(19) United States
(12) Patent Application Publication
(10) Pub. No.: US 2006/0281682 A1
(43) Pub. Date: Dec. 14, 2006

(54) Methods and compositions for the treatment of gastrointestinal disorders

(76) Inventors: Mark G. Currie, Sterling, MA (US); Shalina Mahajan-Miklos, Needham, MA (US)

Correspondence Address: FISH & RICHARDSON PC, P.O. BOX 1022, MINNEAPOLIS, MN, 55440-1022, US

(21) Appl. No.: 10/845,895

(22) Filed: May 14, 2004

Related U.S. Application Data
(63) Continuation-in-part of application No. 10/796,719, filed on Mar. 9, 2004.
Application No. 10/796,719 is a continuation-in-part of application No. 10/766,735, filed on Jan. 28, 2004.
(60) Provisional application No. 60/519,460, filed on Nov. 12, 2003.
(60) Provisional application No. 60/471,288, filed on May 15, 2003.
(60) Provisional application No. 60/443,098, filed on Jan. 28, 2003.

(51) Int. Cl. A61K 38/16; A61K 38/10; A61K 31/485; A61K 31/445; A61K 31/165; A61K 31/353

(52) U.S. Cl. 514/13; 530/326; 514/15; 514/14; 514/282; 514/317; 514/355; 514/454; 514/618

(57) ABSTRACT

The present invention features compositions and related methods for treating IBS and other gastrointestinal disorders and conditions (e.g., gastrointestinal motility disorders, functional gastrointestinal disorders, gastroesophageal reflux disease (GERD), duodenogastric reflux, Crohn's disease, ulcerative colitis, Inflammatory bowel disease, functional heartburn, dyspepsia (including functional dyspepsia or nonulcer dyspepsia), gastroparesis, chronic intestinal pseudo-obstruction (or colonic pseudo-obstruction), and disorders and conditions associated with constipation, e.g., constipation associated with use of opiate pain killers, post-surgical constipation (post-operative ileus), and constipation associated with neuropathic disorders as well as other conditions and disorders using peptides and other agents that activate the guanylate cyclase C (GC-C) receptor.

### CLAIM OF PRIORITY

[0001] This application is a continuation in part of U.S. Utility patent application Ser. No. 10/796,719, filed Mar. 9, 2004, which is a continuation in part of U.S. Utility patent application Ser. No. 10/766,735, filed Jan. 28, 2004, which claims priority under 35 USC §119(e) to U.S. Provisional Patent Application Ser. No. 60/443,098, filed on Jan. 28, 2003; U.S. Provisional Patent Application Ser. No. 60/471,288, filed on May 15, 2003 and U.S. Provisional Patent Application Ser. No. 60/519,460, filed on Nov. 12, 2003, the entire contents of which are hereby incorporated by reference.

### TECHNICAL FIELD

[0002] This invention relates to methods and compositions for treating various disorders, including gastrointestinal disorders, obesity, congestive heart failure and benign prostatic hyperplasia.

### BACKGROUND

[0003] Irritable bowel syndrome (IBS) is a common chronic disorder of the intestine that affects 20 to 60 million individuals in the US alone (Lehman Brothers, Global Healthcare-Irritable bowel syndrome industry update, September 1999). IBS is the most common disorder diagnosed by gastroenterologists (28% of patients examined) and accounts for 12% of visits to primary care physicians (Camilleri 2001, Gastroenterology 120:652-668). In the US, the economic impact of IBS is estimated at $25 billion annually, through direct costs of health care use and indirect costs of absenteeism from work (Talley 1995, Gastroenterology 109:1736-1741). Patients with IBS have three times more absenteeism from work and report a reduced quality of life. Sufferers may be unable or unwilling to attend social events, maintain employment, or travel even short distances (Drossman 1993, Dig Dis Sci 38:1569-1580). There is a tremendous unmet medical need in this population since few prescription options exist to treat IBS.

[0004] Patients with IBS suffer from abdominal pain and a disturbed bowel pattern. Three subgroups of IBS patients have been defined based on the predominant bowel habit: constipation-predominant (c-IBS), diarrhea-predominant (d-IBS) or alternating between the two (a-IBS). Estimates of individuals who suffer from c-IBS range from 20-50% of the IBS patients with 30% frequently cited. In contrast to the other two subgroups that have a similar gender ratio, c-IBS is more common in women (ratio of 3:1) (Talley et al. 1995, Am J Epidemiol 142:76-83).

[0005] The definition and diagnostic criteria for IBS have been formalized in the “Rome Criteria” (Drossman et al. 1999, Gut 45:Suppl II: 1-81), which are well accepted in clinical practice. However, the complexity of symptoms has not been explained by anatomical abnormalities or metabolic changes. This has led to the classification of IBS as a functional GI disorder, which is diagnosed on the basis of the Rome criteria and limited evaluation to exclude organic disease (Ringel et al. 2001, Annu Rev Med 52: 319-338). IBS is considered to be a “biopsychosocial” disorder resulting from a combination of three interacting mechanisms: altered bowel motility, an increased sensitivity of the intestine or colon to pain stimuli (visceral sensitivity) and psychosocial factors (Camilleri 2001, Gastroenterology 120:652-668). Recently, there has been increasing evidence for a role of inflammation in etiology of IBS. Reports indicate that subsets of IBS patients have small but significant increases in colonic inflammatory and mast cells, increased inducible nitric oxide (NO) and synthase (iNOS) and altered expression of inflammatory cytokines (reviewed by Talley 2000, Medscape Coverage of DDW week).

### SUMMARY

[0006] The present invention features compositions and related methods for treating IBS and other gastrointestinal disorders and conditions (e.g., gastrointestinal motility disorders, functional gastrointestinal disorders, gastroesophageal reflux disease (GERD), duodenogastric reflux, Crohn's disease, ulcerative colitis, inflammatory bowel disease, functional heartburn, dyspepsia (including functional dyspepsia or nonulcer dyspepsia), gastroparesis, chronic intestinal pseudo-obstruction (or colonic pseudo-obstruction), and disorders and conditions associated with constipation, e.g., constipation associated with use of opiate pain killers, post-surgical constipation, and constipation associated with neuropathic disorders as well as other conditions and disorders. The compositions feature peptides that activate the guanylate cyclase C (GC-C) receptor.

[0007] The present invention also features compositions and related methods for treating obesity, congestive heart failure and benign prostatic hyperplasia (BPH).

[0008] Without being bound by any particular theory, in the case of IBS and other gastrointestinal disorders the peptides are useful because they can increase gastrointestinal motility.

[0009] Without being bound by any particular theory, in the case of IBS and other gastrointestinal disorders the peptides are useful, in part, because they can decrease inflammation.

[0010] Without being bound by any particular theory, in the case of IBS and other gastrointestinal disorders the peptides are also useful because they can decrease gastrointestinal pain or visceral pain.

[0011] The invention features pharmaceutical compositions comprising certain peptides that are capable of activating the guanylate-cyclase C (GC-C) receptor. Also within the invention are pharmaceutical compositions comprising a peptide of the invention as well as combination compositions comprising a peptide of the invention and at least one additional therapeutic agent, e.g., an agent for treating constipation (e.g., a chloride channel activator such as SPI-0211; Sucampo Pharmaceuticals, Inc.; Bethesda, Md., a laxative such as MiraLax; Braintree Laboratories, Braintree Mass.) or some other gastrointestinal disorder. Examples of additional therapeutic agent include: acid reducing agents such as proton pump inhibitors (e.g. omeprazole, esomeprazole, lansoprazole, pantorazole and rabeprazole) and H2 receptor blockers (e.g. cimetidine, ranitidine, famotidine and nizatidine), pro-motility agents such as motilin agonists (e.g GM-611 or mitemcinal fumarate), and 5HT receptor agonists (e.g. 5HT4 receptor agonists such as Zelnorm®; 5HT3 receptor agonists such as MKC-733), 5HT receptor antagonists (e.g 5HT1, 5HT2, 5HT3 (e.g alosetron), and 5HT4 receptor antagonists; muscarinic receptor agonists, anti-inflammatory agents, antispasmodics, antidepressants, centrally-acting analgesic agents such as opiod receptor agonists, opiod receptor antagonists (e.g. naltrexone), agents for the treatment of Inflammatory bowel disease, Crohn's disease and ulcerative colitis (e.g., Traficet-EN™ (ChemoCentryx, Inc.; San Carlos, Calif.)) agents that treat gastrointestinal or visceral pain and cGMP phosphodiesterase inhibitors (motapizone, zaprinast, and suldinac sulfone). The peptides of the invention can also be used in combination with agents such a tianeptine (Stablon®) and other agents described in U.S. 6,683,072; (E)-4 (1,3bis(cyclohexylmethyl)-1,2,34,-tetrahydro-2,6-diono-9H-purin-8-yl)cinnamic acid nonaethylene glycol methyl ether ester and related compounds described in WO 02/067942. The peptides can also be used in combination with purgatives that draw fluids to the intestine (e.g., Visicol®, a combination of sodium phosphate monobasic monohydrate and sodium phosphate dibasic anhydrate. The peptides can also be used in combination with treatments entailing the administration of microorganisms useful in the treatment of gastrointestinal disorders such as IBS. Probactrix® (The BioBalance Corporation; New York, N.Y.) is one example of a formulation that contains microorganisms useful in the treatment of gastrointestinal disorders. In addition, the pharmaceutical compositions can include an agent selected from the group consisting of: Ca channel blockers (e.g., ziconotide), complete or partial 5HT receptor antagonists (for example 5HT3 (e.g., alosetron, ATI-7000; Aryx Thearpeutics, Santa Clara Calif.), 5HT4, 5HT2, and 5HT1 receptor antagonists), complete or partial 5HT receptor agonists including 5HT3, 5HT2, 5HT4 (e.g., tegaserod, mosapride and renzapride) and 5HT1 receptor agonists, CRF receptor agonists (NBI-34041), β-3 adrenoreceptor agonists, opioid receptor agonists (e.g., loperamide, fedotozine, and fentanyl, naloxone, naltrexone, methyl nalozone, nalmefene, cypridime, beta funaltrexamine, naloxonazine, naltrindole, and nor-binaltorphimine, morphine, diphenyloxylate, enkephalin pentapeptide, asimadoline, and trimebutine), NK1 receptor antagonists (e.g., ezlopitant and SR-14033), CCK receptor agonists (e.g., loxiglumide), NK1 receptor antagonists, NK3 receptor antagonists (e.g., talnetant, osanetant (SR-142801), SSR-241586), norepinephrine-serotonin reuptake inhibitors (NSRI; e.g., milnacipran), vanilloid and cannabanoid receptor agonists (e.g., arvanil), sialorphin, sialorphin-related peptides comprising the amino acid sequence QHNPR (SEQ ID NO:1661) for example, VQHNPR (SEQ ID NO:1662); VRQHNPR (SEQ ID NO:1663); VRGQHNPR (SEQ ID NO:1664); VRGPQHNPR (SEQ ID NO:1665); VRGPRQHNPR (SEQ ID NO:1666); VRGPRRQHNPR (SEQ ID NO: 1667); and RQHNPR (SEQ ID NO: 1668), compounds or peptides that are inhibitors of neprilysin, frakefamide (H-Tyr-D-Ala-Phe(F)-Phe-NH₂; WO 01/019849 A1), loperamide, Tyr-Arg (kyotorphin), CCK receptor agonists (caerulein), conotoxin peptides, pepetide analogs of thymulin, loxiglumide, dexloxiglumide (the R-isomer of loxiglumide) (WO 88/05774) and other analgesic peptides or compounds. These peptides and compounds can be administered with the peptides of the invention (simultaneously or sequentially). They can also be covalently linked to a peptide of the invention to create therapeutic conjugates.

[0012] The invention includes methods for treating various gastrointestinal disorders by administering a peptide that acts as a partial or complete agonist of the GC-C receptor. The peptide includes at least six cysteines that can three disulfide bonds. In certain embodiments the disulfide bonds are replaced by other covalent cross-links and in some cases the cysteines are substituted by other residues to provide for alternative covalent cross-links. The peptides may also include at least one trypsin or chymotrypsin cleavage site and/or a carboxy-terminal analgesic peptide or small molecule, e.g., AspPhe or some other analgesic peptide. When present within the peptide, the analgesic peptide or small molecule may be preceded by a chymotrypsin or trypsin cleavage site that allows release of the analgesic peptide or small molecule. The peptides and methods of the invention are also useful for treating pain and inflammation associated with various disorders, including gastrointestinal disorders. Certain peptides include a functional chymotrypsin or trypsin cleavage site located so as to allow inactivation of the peptide upon cleavage. Certain peptides having a functional cleavage site undergo cleavage and gradual inactivation in the digestive tract, and this is desirable in some circumstances. In certain peptides, a functional chymotrypsin site is altered, increasing the stability of the peptide in vivo.

[0013] The invention includes methods for treating other disorders such as congestive heart failure and benign prostatic hyperplasia by administering a peptide or small molecule (parenterally or orally) that acts as an agonist of the GC-C receptor. Such agents can be used in combination with natriuretic peptides (e.g., atrial natriuretic peptide, brain natriuretic peptide or C-type natriuretic peptide), a diuretic, or an inhibitor of angiotensin converting enzyme.

[0014] The invention features methods and compositions for increasing intestinal motility. Intestinal motility involves spontaneous coordinated dissentions and contractions of the stomach, intestines, colon and rectum to move food through the gastrointestinal tract during the digestive process.

[0015] In certain embodiments the peptides include either one or two or more contiguous negatively charged amino acids (e.g., Asp or Glu) or one or two or more contiguous positively charged residues (e.g., Lys or Arg) or one or two or more contiguous positively or negatively charged amino acids at the carboxy terminus. In these embodiments all of the flanking amino acids at the carboxy terminus are either positively or negatively charged. In other embodiments the carboxy terminal charged amino acids are preceded by a Leu. For example, the following amino acid sequences can be added to the carboxy terminus of the peptide: Asp; Asp Lys; Lys Lys Lys Lys Lys Lys (SEQ ID NO:127); Asp Lys Lys Lys Lys Lys Lys (SEQ ID NO:128); Leu Lys Lys; and Leu Asp. It is also possible to simply add Leu at the carboxy terminus.

[0016] In a first aspect, the invention features a peptide comprising, consisting of, or consisting essentially of the amino acid sequence (I): Xaa₁ Xaa₂ Xaa₃ Xaa₄ Xaa₅ Cys₆ Cys₇ Xaa₈ Xaa₉ Cys₁₀ Cys₁₁ Xaa₁₂ Xaa₁₃ Xaa₁₄ Cys₁₅ Xaa₁₆ Xaa₁₇ Cys₁₈ Xaa₁₉ Xaa₂₀ Xaa₂₁ (SEQ ID NO: 1) wherein: Xaa₁ Xaa₂ Xaa₃ Xaa₄ Xaa₅ is Asn Ser Ser Asn Tyr (SEQ ID NO:126) or is missing or Xaa₁ Xaa₂ Xaa₃ Xaa₄ is missing. In certain embodiments Xaa₈, Xaa₉, Xaa₁₂, Xaa₁₃, Xaa₁₄, Xaa₁₇, and Xaa₁₉ can be any amino acid. In certain embodiments Xaa₅ is Asn, Trp, Tyr, Asp, or Phe. In other embodiments, Xaa₅ can also be Thr or Ile. In other embodiments Xaa₅ is Tyr, Asp or Trp. In some embodiments Xaa₈ is Glu, Asp, Gln, Gly or Pro. In other embodiments Xaa₈ is Glu; in some embodiments Xaa₉ is Leu, Ile, Val, Ala, Lys, Arg, Trp, Tyr or Phe in some embodiments Xaa₉ is Leu, Ile, Val, Lys, Arg, Trp, Tyr or Phe.

[0017] In certain embodiments, the peptide includes disulfide bonds between Cys₆ and Cys₁₁, between Cys₇ and Cys₁₅ and between Cys₁₀ and Cys₁₆. In other embodiments, the peptide is a reduced peptide having no disulfide bonds. In still other embodiments the peptide has one or two disulfide bonds chosen from: a disulfide bond between Cys₆ and Cys₁₁, a disulfide bond between Cys₇ and Cys₁₅ and a disulfide bond between Cys₁₀ and Cys₁₆.

[0018] In certain embodiments, one or more amino acids can be replaced by a non-naturally occurring amino acid or a naturally or non-naturally occurring amino acid analog. For example, an aromatic amino acid can be replaced by 3,4-dihydroxy-L-phenylalanine, 3-iodo-L-tyrosine, triiodothyronine, L-thyroxine, phenylglycine (Phg) or nor-tyrosine (norTyr). Phg and norTyr and other amino acids including Phe and Tyr can be substituted by, e.g., a halogen, —CH3, —OH, —CH₂NH₃, —C(O)H, —CH₂CH₃, —CN, —CH₂CH₂CH₃, —SH, or another group.

[0019] Further examples of unnatural amino acids include: an unnatural analogue of tyrosine; an unnatural analogue of glutamine; an unnatural analogue of phenylalanine; an unnatural analogue of serine; an unnatural analogue of threonine; an alkyl, aryl, acyl, azido, cyano, halo, hydrazine, hydrazide, hydroxyl, alkenyl, alkynl, ether, thiol, sulfonyl, seleno, ester, thioacid, borate, boronate, phospho, phosphono, phosphine, heterocyclic, enone, imine, aldehyde, hydroxylamine, keto, or amino substituted amino acid, or any combination thereof; an amino acid with a photoactivatable cross-linker; a spin-labeled amino acid; a fluorescent amino acid; an amino acid with a novel functional group; an amino acid that covalently or noncovalently interacts with another molecule; a metal binding amino acid; a metal-containing amino acid; a radioactive amino acid; a photocaged and/or photoisomerizable amino acid; a biotin or biotin-analogue containing amino acid; a glycosylated or carbohydrate modified amino acid; a keto containing amino acid; amino acids comprising polyethylene glycol or polyether; a heavy atom substituted amino acid (e.g., an amino acid containing deuterium, tritium, ¹³C, ¹⁵N, or ¹⁸O); a chemically cleavable or photocleavable amino acid; an amino acid with an elongated side chain; an amino acid containing a toxic group; a sugar substituted amino acid, e.g., a sugar substituted serine or the like; a carbon-linked sugar-containing amino acid; a redox-active amino acid; an α.-hydroxy containing acid; an amino thio acid containing amino acid; an α, α disubstituted amino acid; a β-amino acid; a cyclic amino acid other than proline; an O-methyl-L-tyrosine; an L-3-(2-naphthyl)alanine; a 3-methyl-phenylalanine; a p-acetyl-L-phenylalanine; an 0-4-allyl-L-tyrosine; a 4-propyl-L-tyrosine; a tri-O-acetyl-GlcNAcβ-serine; an L-Dopa; a fluorinated phenylalanine; an isopropyl-L-phenylalanine; a p-azido-L-phenylalanine; a p-acyl-L-phenylalanine; a p-benzoyl-L-phenylalanine; an L-phosphoserine; a phosphonoserine; a phosphonotyrosine; a p-iodo-phenylalanine; a 4-fluorophenylglycine; a p-bromophenylalanine; a p-amino-L-phenylalanine; a isopropyl-L-phenylalanine; L-3-(2-naphthyl)alanine; an amino-, isopropyl-, or O-allyl-containing phenylalanine analogue; a dopa, O-methyl-L-tyrosine; a glycosylated amino acid; a p-(propargyloxy)phenylalanine, dimethyl-Lysine, hydroxy-proline, mercaptopropionic acid, methyl-lysine, 3-nitro-tyrosine, norleucine, pyro-glutamic acid, Z (Carbobenzoxyl), ε-Acetyl-Lysine, β-alanine, aminobenzoyl derivative, aminobutyric acid (Abu), citrulline, aminohexanoic acid, aminoisobutyric acid, cyclohexylalanine, d-cyclohexylalanine, hydroxyproline, nitro-arginine, nitro-phenylalanine, nitro-tyrosine, norvaline, octahydroindole carboxylate, ornithine, penicillamine, tetrahydroisoquinoline, acetamidomethyl protected amino acids and a pegylated amino acid. Further examples of unnatural amino acids can be found in U.S. 20030108885, U.S. 20030082575, and the references cited therein.

[0020] In some embodiments, an amino acid can be replaced by a naturally-occurring, non-essential amino acid, e.g., taurine.

[0021] Methods to manfacture peptides containing unnatural amino acids can be found in, for example, U.S. 20030108885, U.S. 20030082575, Deiters et al., J Am Chem Soc. (2003) 125:11782-3, Chin et al., Science (2003) 301:964-7, and the references cited therein.

[0022] The peptides of the invention can be modified using standard modifications. Modifications may occur at the amino (N-), carboxy (C-) terminus, internally or a combination of any of the preceeding. In one aspect of the invention, there may be more than one type of modification on the peptide. Modifications include but are not limited to: acetylation, amidation, biotinylation, cinnamoylation, famesylation, formylation, myristoylation, palmitoylation, phosphorylation (Ser, Tyr or Thr), stearoylation, succinylation, sulfurylation and cyclisation (via disulfide bridges or amide cyclisation), and modification by Cy3 or Cy5. The peptides of the invention may also be modified by 2, 4-dinitrophenyl (DNP), DNP-lysin, modification by 7-Amino-4-methyl-coumarin (AMC), flourescein, NBD (7-Nitrobenz-2-Oxa-1,3-Diazole), p-nitro-anilide, rhodamine B, EDANS (5-((2-aminoethyl)amino)naphthalene-1-sulfonic acid), dabcyl, dabsyl, dansyl, texas red, FMOC, and Tamra (Tetramethylrhodamine). The peptides of the invention may also be conjugated to, for example, polyethylene glycol (PEG); alkyl groups (e.g., C1-C20 straight or branched alkyl groups); fatty acid radicals; combinations of PEG, alkyl groups and fatty acid radicals (see U.S. Pat. No. 6,309,633; Soltero et al., 2001 Innovations in Pharmaceutical Technology 106-110); BSA and KLH (Keyhole Limpet Hemocyanin).

[0023] In some embodiments Xaa₁₂ is Asn, Tyr, Asp or Ala. In other embodiments Xaa₁₂ is Asn. In some embodiments Xaa₁₃ is Ala, Pro or Gly, and in other embodiments it is Pro. In some embodiments Xaa₁₄ is Ala, Leu, Ser, Gly, Val, Glu, Gln, Ile, Leu, Lys, Arg, or Asp, and in other embodiments it is Ala or Gly, and in still other embodiments it is Ala. In some embodiments Xaa₁₆ is Thr, Ala, Asn, Lys, Arg, Trp; Xaa₁₇ is Gly, Pro or Ala; Xaa₁₉ is selected from Trp, Tyr, Phe, Asn and Leu or Xaa₁₉ is selected from Trp, Tyr, and Phe or Xaa₁₉ is selected from Leu, Ile and Val; or Xaa₁₉ is His or Xaa₁₉ is selected from Trp, Tyr, Phe, Asn, Ile, Val, His and Leu; and Xaa₂₀ Xaa₂₁ is AspPhe or is missing or Xaa₂₀ is Asn or Glu and Xaa₂₁ is missing or Xaa₁₉ Xaa₂₀ Xaa₂₁ is missing. The invention also features methods for treating a gastrointestinal disorder (e.g., a gastrointestinal motility disorder, a functional gastrointestinal disorder, gastroesophageal reflux disease, functional heartburn, dyspepsia, functional dyspepsia, nonulcer dyspepsia, gastroparesis, chronic intestinal pseudo-obstruction, colonic pseudo-obstruction), obesity, congestive heart failure or benign prostatic hyperplasia by administering a composition comprising an aforementioned peptide

[0024] When Xaa₉ is Trp, Tyr or Phe or when Xaa₁₆ is Trp the peptide has a potentially functional chymotrypsin cleavage site that is located at a position where cleavage will inactivate GC-C receptor binding by the peptide. When Xaa₉ is Lys or Arg or when Xaa₁₆ is Lys or Arg, the peptide has a potentially functional trypsin cleavage site that is located at a position where cleavage will inactivate GC-C receptor binding by the peptide.

[0025] When Xaa₁₉ is Trp, Tyr or Phe, the peptide has a chymotrypsin cleavage site that is located at a position where cleavage will liberate the portion of the peptide carboxy-terminal to Xaa₁₉. When Xaa₁₉ is Leu, Ile or Val, the peptide can have a chymotrypsin cleavage site that is located at a position where cleavage will liberate the portion of the peptide amino-terminal to Xaa₁₉. At relatively high pH the same effect is seen when Xaa₁₉ is His. When Xaa₁₉ is Lys or Arg, the peptide has a trypsin cleavage site that is located at a position where cleavage will liberate portion of the peptide carboxy-terminal to Xaa₁₉. Thus, if the peptide includes an analgesic peptide carboxy-terminal to Xaa₁₉, the peptide will be liberated in the digestive tract upon exposure to the appropriate protease. Among the analgesic peptides which can be included in the peptide and/or coadministered with the peptide are: AspPhe (as Xaa₂₀Xaa₂₁), endomorphin-1, endomorphin-2, nocistatin, dalargin, lupron, and substance P and other analgesic peptides described herein. These peptides can, for example, be used to replace Xaa₂₀Xaa₂₁.

[0026] When Xaa₁ or the amino-terminal amino acid of the peptide of the invention (e.g., Xaa₂ or Xaa₃) is Trp, Tyr or Phe, the peptide has a chymotrypsin cleavage site that is located at a position where cleavage will liberate the portion of the peptide amino-terminal to Xaa₁ (or Xaa₂ or Xaa₃) along with Xaa₁, Xaa₂ or Xaa₃. When Xaa₁ or the amino-terminal amino acid of the peptide of the invention (e.g., Xaa₂ or Xaa₃) is Lys or Arg, the peptide has a trypsin cleavage site that is located at a position where cleavage will liberate portion of the peptide amino-terminal to Xaa₁ along with Xaa₁, Xaa₂ or Xaa₃). When Xaa₁ or the amino-terminal amino acid of the peptide of the invention is Leu, Ile or Val, the peptide can have a chymotrypsin cleavage site that is located at a position where cleavage will liberate the portion of the peptide amino-terminal to Xaa₁. At relatively high pH the same effect is seen when Xaa₁ is His. Thus, for example, if the peptide includes an analgesic peptide amino-terminal to Xaa₁, the peptide will be liberated in the digestive tract upon exposure to the appropriate protease. Among the analgesic peptides which can be included in the peptide are: AspPhe, endomorphin-1, endomorphin-2, nocistatin, dalargin, lupron, and substance p and other analgesic peptides described herein.

[0027] When fully folded, disulfide bonds may be present between: Cys₆ and Cys₁₁; Cys₇ and Cys₁₅; and Cys₁₀ and Cys₁₈. The peptides of the invention bear some sequence similarity to ST peptides. However, they include amino acid changes and/or additions that improve functionality. These changes can, for example, increase or decrease activity (e.g., increase or decrease the ability of the peptide to stimulate intestinal motility), alter the ability of the peptide to fold correctly, the stability of the peptide, the ability of the peptide to bind the GC-C receptor and/or decrease toxicity. In some cases the peptides may function more desirably than wild-type ST peptide. For example, they may limit undesirable side effects such as diarrhea and dehydration.

[0028] In some embodiments one or both members of one or more pairs of Cys residues which normally form a disulfide bond can be replaced by homocysteine, 3-mercaptoproline (Kolodziej et al. 1996 Int J Pept Protein Res 48:274); β, β dimethylcysteine (Hunt et al. 1993 Int J Pept Protein Res 42:249) or diaminopropionic acid (Smith et al. 1978 J Med Chem 21:117) to form alternative internal cross-links at the positions of the normal disulfide bonds.

[0029] In addition, one or more disulfide bonds can be replaced by alternative covalent cross-links, e.g., an amide bond, an ester linkage, an alkyl linkage, a thio ester linkage, a lactam bridge, a carbamoyl linkage, a urea linkage, a thiourea linkage, a phosphonate ester linkage, an alkyl linkage, and alkenyl linkage, an ether, a thioether linkage, or an amino linkage. For example, Ledu et al. (Proceedings Nat'l Acad. Sci. 100:11263-78, 2003) described methods for preparing lactam and amide cross-links. Schafineister et al. (J. Am. Chem. Soc. 122:5891, 2000) describes stable, all carbon cross-links. In some cases, the generation of such alternative cross-links requires replacing the Cys residues with other residues such as Lys or Glu or non-naturally occurring amino acids.

[0030] In the case of a peptide comprising the sequence (I): Xaa₁ Xaa₂ Xaa₃ Xaa₄ Xaa₅ Cys₆ Cys₇ Xaa₈ Xaa₉ Cys₁₀ Cys₁₁ Xaa₁₂ Xaa₁₃ Xaa₁₄ Cys₁₅ Xaa₁₆ Xaa₁₇ Cys₁₈ Xaa₁₉ Xaa₂₀ Xaa₂₁ wherein: Xaa₁ Xaa₂ Xaa₃ Xaa₄ Xaa₅ is missing and/or the sequence Xaa₁₉ Xaa₂₀ Xaa₂₁ is missing, the peptide can still contain additional carboxyterminal or amino terminal amino acids or both. For example, the peptide can include an amino terminal sequence that facilitates recombinant production of the peptide and is cleaved prior to administration of the peptide to a patient. The peptide can also include other amino terminal or carboxyterminal amino acids. In some cases the additional amino acids protect the peptide, stabilize the peptide or alter the activity of the peptide. In some cases some or all of these additional amino acids are removed prior to administration of the peptide to a patient. The peptide can include 1, 2, 3, 4, 5, 10, 15, 20, 25, 30, 40, 50, 60, 70 80, 90, 100 or more amino acids at its amino terminus or carboxy terminus or both. The number of flanking amino acids need not be the same. For example, there can be 10 additional amino acids at the amino terminus of the peptide and none at the carboxy terminus.

[0031] In one embodiment the peptide comprises the amino acid sequence (I): Xaa₁ Xaa₂ Xaa₃ Xaa₄ Xaa₅ Cys₆ Cys₇ Xaa₈ Xaa₉ Cys₁₀ Cys₁₁ Xaa₁₂ Xaa₁₃ Xaa₁₄ Cys₁₅ Xaa₁₆ Xaa₁₇ Cys₁₈ Cys₁₉ Xaa₂₀ Xaa₂₁ (SEQ ID NO:1669) wherein: Xaa₁ Xaa₂ Xaa₃ Xaa₄ Xaa₅ is missing; Xaa₈ is Glu; Xaa₉ is Leu, Ile, Lys, Arg, Trp, Tyr or Phe; Xaa₁₂ is Asn; Xaa₁₃ is Pro; Xaa₁₄ is Ala; Xaa₁₆ is Thr, Ala, Lys, Arg, Trp; Xaa₁₇ is Gly; Xaa₁₉ is Tyr or Leu; and Xaa₂₀ Xaa₂₁ is AspPhe or is missing. Where Xaa₂₀ Xaa₂₁ and/or Xaa₁ Xaa₂ Xaa₃ Xaa₄ Xaa₅ are missing, there may be additional flanking amino acids in some embodiments. In certain embodiments of a composition comprising a peptide the sequence (I): Xaa₁ Xaa₂ Xaa₃ Xaa₄ Xaa₅ Cys₆ Cys₇ Xaa₈ Xaa₉ Cys₁₀ Cys₁₁ Xaa₁₂ Xaa₁₃ Xaa₁₄ Cys₁₅ Xaa₁₆ Xaa₁₇ Cys₁₈ Xaa₁₉ Xaa₂₀ Xaa₂₁, the peptide does not consist of any of the peptides of Table I.

[0032] In a second aspect, the invention also features a therapeutic or prophylactic method comprising administering a peptide comprising the amino acid sequence (I): Xaa₁ Xaa₂ Xaa₃ Xaa₄ Xaa₅ Cys₆ Cys₇ Xaa₈ Xaa₉ Cys₁₀ Cys₁₁ Xaa₁₂ Xaa₁₃ Xaa₁₄ Cys₁₅ Xaa₁₆ Xaa₁₇ Cys₁₈ Xaa₁₉ Xaa₂₀ Xaa₂₁ (SEQ ID NO:1670) wherein: Xaa₁ Xaa₂ Xaa₃ Xaa₄ Xaa₅ is Asn Ser Ser Asn Tyr or is missing or Xaa₁ Xaa₂ Xaa₃ Xaa₄ is missing and Xaa₅ is Asn, Trp, Tyr, Asp, Ile, Thr, or Phe; Xaa₈ is Glu, Asp, Gln, Gly or Pro; Xaa₉ is Leu, Ile, Val, Ala, Lys, Arg, Trp, Tyr or Phe; Xaa₁₂ is Asn, Tyr, Asp or Ala; Xaa₁₃ is Pro or Gly; Xaa₁₄ is Ala, Leu, Ser, Gly, Val, Glu, Gln, Ile, Leu, Lys, Arg, and Asp; Xaa₁₆ is Thr, Ala, Asn, Lys, Arg, Trp; Xaa₁₇ is Gly, Pro or Ala; Xaa₁₉ is Trp, Tyr, Phe or Leu; and Xaa₂₀ Xaa₂₁ is AspPhe or is missing or Xaa₂₀ is Asn or Glu and Xaa₂₁ is missing or Xaa₁₉ Xaa₂₀ Xaa₂₁ is missing.

[0033] In certain embodiments of the therapeutic or prophylactic methods: the peptide comprises the amino acid sequence (I): Xaa₁ Xaa₂ Xaa₃ Xaa₄ Xaa₅ Cys₆ Cys₇ Xaa₈ Xaa₉ Cys₁₀ Cys₁₁ Xaa₁₂ Xaa₁₃ Xaa₁₄ Cys₁₅ Xaa₁₆ Xaa₁₇ Cys₁₈ Xaa₁₉ Xaa₂₀ Xaa₂₁ (SEQ ID NO:1671) wherein: Xaa₁ Xaa₂ Xaa₃ Xaa₄ Xaa₅ is missing; Xaa₈ is Glu; Xaa₉ is Leu, Ile, Lys, Arg, Trp, Tyr, or Phe; Xaa₁₂ is Asn; Xaa₁₃ is Pro; Xaa₁₄ is Ala; Xaa₁₆ is Thr, Ala, Lys, Arg, Trp or Xaa₁₆ is any amino acid or Xaa₁₆ is Thr, Ala, Lys, Arg, Trp or Xaa₁₆ is any non-aromatic amino acid; Xaa₁₇ is Gly; Xaa₁₉ is Tyr or Leu; and Xaa₂₀ Xaa₂₁ is AspPhe or is missing.

[0034] In certain embodiments, the invention features, a purified polypeptide comprising the amino acid sequence (II):
[0035] Xaa₁ Xaa₂ Xaa₃ Xaa₄ Xaa₅ Cys₆ Cys₇ Xaa₈ Xaa₉ Cys₁₀ Cys₁₁ Asn₁₂ Pro₁₃ Ala₁₄ Cys₁₅ Xaa₁₆ Gly₁₇ Cys₁₈ Xaa₁₉ Xaa₂₀ Xaa₂₁ (SEQ ID NO:1672) wherein
[0036] Xaa₁ Xaa₂ Xaa₃ Xaa₄ Xaa₅ is Asn Ser Ser Asn Tyr (SEQ ID NO:126) or is missing or Xaa₁ Xaa₂ Xaa₃ Xaa₄ is missing and Xaa₅ is Asn;
[0037] Xaa₈ is Glu or Asp;
[0038] Xaa₉ is Leu, Ile, Val, Trp, Tyr or Phe;
[0039] Xaa₁₆ is Thr, Ala, Trp;
[0040] Xaa₁₉ is Trp, Tyr, Phe or Leu or is missing; and Xaa₂₀ Xaa₂₁ is AspPhe.

[0041] In various embodiments one or more Cys can be replaced by Mpt (mercaptoproline), Pen (penicilliamine) or Dpr (diaminopropionic acid).

[0042] In various embodiments the invention features a purified polypeptide comprising the amino acid sequence (II): Xaa₁ Xaa₂ Xaa₃ Xaa₄ Xaa₅ Cys₆ Cys₇ Xaa₈ Xaa₉ Cys₁₀ Cys₁₁ Asn₁₂ Pro₁₃ Ala₁₄ Cys₁₅ Xaa₁₆ Gly₁₇ Cys₁₈ Xaa₁₉ Xaa₂₀ Xaa₂₁ (SEQ ID NO:1673) wherein, Xaa₉ is Leu, Ile or Val and Xaa₁₆ is Trp, Tyr or Phe; Xaa₉ is Trp, Tyr or Phe, and Xaa₁₆ is Thr or Ala; Xaa₁₉ is Trp, Tyr, Phe and Xaa₂₀ Xaa₂₁ is AspPhe; and Xaa₁ Xaa₂ Xaa₃ Xaa₄ is missing and Xaa₅ is Asn; the peptide comprises fewer than 50, 40, 30 or 25 amino acids; fewer than five amino acids precede Cys₆.

[0043] The peptides can be co-administered with or linked, e.g., covalently linked to any of a variety of other peptides including analgesic peptides or analgesic compounds. For example, a therapeutic peptide of the invention can be linked to an analgesic agent selected from the group consisting of: Ca channel blockers (e.g., ziconotide), complete or partial 5HT receptor antagonists (for example 5HT3 (e.g. alosetron, ATI-7000; Aryx Thearpeutics, Santa Clara Calif.), 5HT4, 5HT2, and 5HT1 receptor antagonists), complete or partial 5HT receptor agonists including 5HT3, 5HT2, 5HT4 (e.g. tegaserod, mosapride and renzapride) and 5HT1 receptor agonists, CRF receptor agonists (NBI-34041), β-3 adrenoreceptor agonists, opioid receptor agonists (e.g., loperamide, fedotozine, and fentanyl, naloxone, naltrexone, methyl nalozone, nalmefene, cypridime, beta funaltrexamine, naloxonazine, naltrindole, and norbinaltorphimine, morphine, diphenyloxylate, enkephalin pentapeptide, asimadoline, and trimebutine), NK1 receptor antagonists (e.g., ezlopitant and SR-14033), CCK receptor agonists (e.g., loxiglumide), NK1 receptor antagonists, NK3 receptor antagonists (e.g., talnetant, osanetant (SR-142801), SSR-241586), norepinephrine-serotonin reuptake inhibitors (NSRI; e.g., milnacipran), vanilloid and cannabanoid receptor agonists (e.g., arvanil), sialorphin, sialorphin-related peptides comprising the amino acid sequence QHNPR (SEQ ID NO:1661) for example, VQHNPR (SEQ ID NO:1662); VRQHNPR (SEQ ID NO:1663); VRGQHNPR (SEQ ID NO:1664); VRGPQHNPR (SEQ ID NO:1665);

[0044] VRGPRQHNPR (SEQ ID NO:1666); VRGPRRQHNPR (SEQ ID NO:1667); and RQHNPR (SEQ ID NO:1668), compounds or peptides that are inhibitors of neprilysin, frakefamide (H-Tyr-D-Ala-Phe(F)-Phe-NH₂; WO 01/019849 A1), loperamide, Tyr-Arg (kyotorphin), CCK receptor agonists (caerulein), conotoxin peptides, pepetide analogs of thymulin, loxiglumide, dexloxiglumide (the R-isomer of loxiglumide) (WO 88/05774) and other analgesic peptides or compounds can be used with or linked to the peptides of the invention.

[0045] Amino acid, non-amino acid, peptide and non-peptide spacers can be interposed between a peptide that is a GC-C receptor agonsit and a peptide that has some other biological function, e.g., an analgesic peptide or a peptide used to treat obesity. The linker can be one that is cleaved from the flanking peptides in vivo or one that remains linked to the flanking peptides in vivo. For example, glycine, beta-alanine, glycyl-glycine, glycyl-beta-alanine, gamma-aminobutyric acid, 6-aminocaproic acid, L-phenylalanine, L-tryptophan and glycil-L-valil-L-phenylalanine can be used as a spacer (Chaltin et al. 2003 Helvetica Chimica Acta 86:533-547; Caliceti et al. 1993 FARMCO 48:919-32) as can polyethylene glycols (Butterworth et al. 1987 J. Med. Chem 30:1295-302) and maleimide derivatives (King et al. 2002 Tetrahedron Lett. 43:1987-1990). Various other linkers are described in the literature (Nestler 1996 Molecular Diversity 2:35-42; Finn et al. 1984 Biochemistry 23:2554-8; Cook et al. 1994 Tetrahedron Lett. 35:6777-80; Brokx et al. 2002 Journal of Controlled Release 78:115-123; Griffin et al. 2003 J. Am. Chem. Soc. 125:6517-6531; Robinson et al. 1998 Proc. Natl. Acad. Sci. USA 95:5929-5934.

[0046] The peptides can include the amino acid sequence of a peptide that occurs naturally in a vertebrate (e.g., mammalian) species or in a bacterial species. In addition, the peptides can be partially or completely non-naturally occurring peptides. Also within the invention are peptidomimetics corresponding to the peptides of the invention. In various embodiments, the patient is suffering from a gastrointestinal disorder; the patient is suffering from a disorder selected from the group consisting of: a gastrointestinal motility disorder, irritable bowel syndrome, chronic constipation, a functional gastrointestinal disorder, gastroesophageal reflux disease, duodenogastric reflux, functional heartburn, dyspepsia, functional dyspepsia, nonulcer dyspepsia, gastroparesis, chronic intestinal pseudo-obstruction, Crohn's disease, ulcerative colitis, Irritable bowel syndrome, colonic pseudo-obstruction, obesity, congestive heart failure, or benign prostatic hyperplasia; the composition is administered orally; the peptide comprises 30 or fewer amino acids, the peptide comprises 20 or fewer amino acids, and the peptide comprises no more than 5 amino acids prior to Cys₆; the peptide comprises 150, 140, 130, 120, 110, 100, 90, 80, 70, 60, 50, 40, or 30 or fewer amino acids. In other embodiments, the peptide comprises 20 or fewer amino acids. In other embodiments the peptide comprises no more than 20, 15, 10, or 5 peptides subsequent to Cys₁₈. In certain embodiments Xaa₁₉ is a chymotrypsin or trypsin cleavage site and an analgesic peptide is present immediately following Xaa₁₉.

[0047] In a third aspect, the invention features a method for treating a patient suffering from constipation. Clinically accepted criteria that define constipation range from the frequency of bowel movements, the consistency of feces and the ease of bowel movement. One common definition of constipation is less than three bowel movements per week. Other definitions include abnormally hard stools or defecation that requires excessive straining (Schiller 2001, Aliment Pharmacol Ther 15:749-763). Constipation may be idiopathic (functional constipation or slow transit constipation) or secondary to other causes including neurologic, metabolic or endocrine disorders. These disorders include diabetes mellitus, hypothyroidism, hyperthyroidism, hypocalcaemia, Multiple Sclerosis, Parkinson's disease, spinal cord lesions, Neurofibromatosis, autonomic neuropathy, Chagas disease, Hirschsprung's disease and Cystic fibrosis. Constipation may also be the result of surgery (postoperative ileus) or due to the use of drugs such as analgesics (like opiods), antihypertensives, anticonvulsants, antidepressants, antispasmodics and antipsychotics.

[0048] The method comprising administering a composition comprising a purified polypeptide comprising the amino acid sequence (I): Xaa₁ Xaa₂ Xaa₃ Xaa₄ Xaa₅ Cys₆ Cys₇ Xaa₈ Xaa₉ Cys₁₀ Cys₁₁ Xaa₁₂ Xaa₁₃ Xaa₁₄ Cys₁₅ Xaa₁₆ Xaa₁₇ Cys₁₈ Xaa₁₉ Xaa₂₀ Xaa₂₁ (SEQ ID NO:1674) wherein: Xaa₁ Xaa₂ Xaa₃ Xaa₄ Xaa₅ is Asn Ser SerAsn Tyr (SEQ ID NO:126) or is missing or Xaa₁ Xaa₂ Xaa₃ Xaa₄ is missing and Xaa₅ is Asn, Trp, Tyr, Asp, Ile, Thr, or Phe; Xaa₈ is Glu, Asp, Gln, Gly or Pro; Xaa₉ is Leu, Ile, Val, Ala, Lys, Arg, Trp, Tyr or Phe; Xaa₁₂ is Asn, Tyr, Asp or Ala; Xaa₁₃ is Pro or Gly; Xaa₁₄ is Ala, Leu, Ser, Gly, Val, Glu, Gln, Ile, Leu, Lys, Arg, and Asp; Xaa₁₆ is Thr, Ala, Asn, Lys, Arg, Trp; Xaa₁₇ is Gly, Pro or Ala; Xaa₁₉ is Trp, Tyr, Phe or Leu; Xaa₁₉ is Lys or Arg; Xaa₂₀ Xaa₂₁ is AspPhe or is missing or Xaa₂₀ is Asn or Glu and Xaa₂₁ is missing or Xaa₁₉ Xaa₂₀ Xaa₂₁ is missing.

[0049] In one embodiment of the method, the peptide comprises the amino acid sequence (I): Xaa₁ Xaa₂ Xaa₃ Xaa₄ Xaa₅ Cys₆ Cys₇ Xaa₈ Xaa₉ Cys₁₀ Cys₁₁ Xaa₁₂ Xaa₁₃ Xaa₁₄ Cys₁₅ Xaa₁₆ Xaa₁₇ Cys₁₈ Xaa₁₉ Xaa₂₀ Xaa₂₁ (SEQ ID NO:1675) wherein: Xaa₁ Xaa₂ Xaa₃ Xaa₄ Xaa₅ is missing; Xaa₈ is Glu; Xaa₉ is Leu, Ile, Lys, Arg, Trp, Tyr or Phe; Xaa₁₂ is Asn; Xaa₁₃ is Pro; Xaa₁₄ is Ala; Xaa₁₆ is Thr, Ala, Lys, Arg, Trp; Xaa₁₇ is Gly; Xaa₁₉ is Tyr or Leu; Xaa₁₉ is Lys or Arg; Xaa₂₀ Xaa₂₁ is AspPhe or is missing.

[0050] In various embodiments, the constipation is associated with use of a therapeutic agent; the constipation is associated with a neuropathic disorder; the constipation is post-surgical constipation (postoperative ileus); and the constipation associated with a gastrointestinal disorder; the constipation is idiopathic (functional constipation or slow transit constipation); the constipation is associated with neuropathic, metabolic or endocrine disorder (e.g., diabetes mellitus, hypothyroidism, hyperthyroidism, hypocalcaemia, Multiple Sclerosis, Parkinson's disease, spinal cord lesions, neurofibromatosis, autonomic neuropathy, Chagas disease, Hirschsprung's disease or cystic fibrosis). Constipation may also be the result of surgery (postoperative ileus) or due the use of drugs such as analgesics (e.g., opiods), antihypertensives, anticonvulsants, antidepressants, antispasmodics and antipsychotics.

[0051] In a fourth aspect, the invention features a method for treating a patient suffering a gastrointestinal disorder, the method comprising administering to the patient a composition comprising a purified polypeptide comprising the amino acid sequence (I): Xaa₁ Xaa₂ Xaa₃ Xaa₄ Xaa₅ Cys₆ Cys₇ Xaa₈ Xaa₉ Cys₁₀ Cys₁₁ Xaa₁₂ Xaa₁₃ Xaa₁₄ Cys₁₅ Xaa₁₆ Xaa₁₇ Cys₁₈ Xaa₁₉ Xaa₂₀ Xaa₂₁ (SEQ ID NO:1674) wherein: Xaa₁ Xaa₂ Xaa₃ Xaa₄ Xaa₅ is Asn Ser Ser Asn Tyr (SEQ ID NO:126) or is missing or Xaa₁ Xaa₂ Xaa₃ Xaa₄ is missing and Xaa₅ is Asn, Trp, Tyr, Asp, Ile, Thr, or Phe; Xaa₈ is Glu, Asp, Gln, Gly or Pro; Xaa₉ is Leu, Ile, Val, Ala, Lys, Arg, Trp, Tyr or Phe; Xaa₁₂ is Asn, Tyr, Asp or Ala; Xaa₁₃ is Pro or Gly; Xaa₁₄ is Ala, Leu, Ser, Gly, Val, Glu, Gln, Ile, Leu, Lys, Arg, and Asp; Xaa₁₆ is Thr, Ala, Asn, Lys, Arg, Trp; Xaa₁₇ is Gly, Pro or Ala; Xaa₁₉ is Trp, Tyr, Phe or Leu; Xaa₁₉ is Lys or Arg;Xaa₂₀ Xaa₂₁ is AspPhe or is missing or Xaa₂₀ is Asn or Glu and Xaa₂₁ is missing or Xaa₁₉ Xaa₂₀ Xaa₂₁ is missing.

[0052] In one embodiment of the method, the peptide comprises the amino acid sequence (I): Xaa₁ Xaa₂ Xaa₃ Xaa₄ Xaa₅ Cys₆ Cys₇ Xaa₈ Xaa₉ Cys₁₀ Cys₁₁ Xaa₁₂ Xaa₁₃ Xaa₁₄ Cys₁₅ Xaa₁₆ Xaa₁₇ Cys₁₈ Xaa₁₉ Xaa₂₀ Xaa₂₁ (SEQ ID NO:1675)wherein: Xaa₁ Xaa₂ Xaa₃ Xaa₄ Xaa₅ is missing; Xaa₈ is Glu; Xaa₉ is Leu, Ile, Lys, Arg, Trp, Tyr or Phe; Xaa₁₂ is Asn; Xaa₁₃ is Pro; Xaa₁₄ is Ala; Xaa₁₆ is Thr, Ala, Lys, Arg, Trp; Xaa₁₇ is Gly; Xaa₁₉ is Tyr or Leu; Xaa₁₉ is Lys or Arg; Xaa₂₀ Xaa₂₁ is AspPhe or is missing.

[0053] In various embodiments, the patient is suffering from a gastrointestinal disorder; the patient is suffering from a disorder selected from the group consisting of: a gastrointestinal motility disorder, irritable bowel syndrome, chronic constipation, a functional gastrointestinal disorder, gastroesophageal reflux disease, functional heartburn, dyspepsia, functional dyspepsia, nonulcer dyspepsia, gastroparesis, chronic intestinal pseudo-obstruction, Crohn's disease, ulcerative colitis, Inflammatory bowel disease, colonic pseudo-obstruction, obesity, congestive heart failure, or benign prostatic hyperplasia.

[0054] In various embodiments, Xaa₉ is Leu, Ile or Val and Xaa₁₆ is Trp, Tyr or Phe; Xaa₉ is Trp, Tyr or Phe and Xaa₁₆ is Thr or Ala; Xaa₁₉ is Trp, Tyr, Phe; Xaa₁₉ is Lys or Arg; Xaa₂₀ Xaa₂₁ is AspPhe; Xaal Xaa₂ Xaa₃ Xaa₄ is missing and Xaa₅ is Asn.

[0055] In a fifth aspect, the invention features a method for increasing gastrointestinal motility in a patient, the method comprising: administering to the patient a composition comprising a purified polypeptide comprising the amino acid sequence (I): Xaa₁ Xaa₂ Xaa₃ Xaa₄ Xaa₅ Cys₆ Cys₇ Xaa₈ Xaa₉ Cys₁₀ Cys₁₁ Xaa₁₂ Xaa₁₃ Xaa₁₄ Cys₁₅ Xaa₁₆ Xaa₁₇ Cys₁₈ Xaa₁₉ Xaa₂₀ Xaa₂₁ (SEQ ID NO:1674) wherein: Xaa₁ Xaa₂ Xaa₃ Xaa₄ Xaa₅ is Asn Ser Ser Asn Tyr (SEQ ID NO:126) or is missing or Xaa₁ Xaa₂ Xaa₃ Xaa₄ is missing and Xaa₅ is Asn, Trp, Tyr, Asp, Ile, Thr, or Phe; Xaa₈ is Glu, Asp, Gln, Gly or Pro; Xaa₉ is Leu, Ile, Val, Ala, Lys, Arg, Trp, Tyr or Phe; Xaa₁₂ is Asn, Tyr, Asp or Ala; Xaa₁₃ is Pro or Gly; Xaa₁₄ is Ala, Leu, Ser, Gly, Val, Glu, Gln, Ile, Leu, Lys, Arg, and Asp; Xaa₁₆ is Thr, Ala, Asn, Lys, Arg, Trp; Xaa₁₇ is Gly, Pro or Ala; Xaa₁₉ is Trp, Tyr, Phe or Leu; Xaa₁₉ is Lys or Arg; Xaa₂₀ Xaa₂₁ is AspPhe or is missing or Xaa₂₀ is Asn or Glu and Xaa₂₁ is missing or Xaa₁₉ Xaa₂₀ Xaa₂₁ is missing.

[0056] In one embodiment the peptide comprises the amino acid sequence (I): Xaa₁ Xaa₂ Xaa₃ Xaa₄ Xaa₅ Cys₆ Cys₇ Xaa₈ Xaa₉ Cyslo CysiI Xaa₁₂ Xaa₁₃ Xaa₁₄ Cys₁₅ Xaa₁₆ Xaa₁₇ Cys₁₈ Xaa₁₉ Xaa₂₀ Xaa₂₁ (SEQ ID NO:1675) wherein: Xaa₁ Xaa₂ Xaa₃ Xaa₄ Xaa₅ is missing; Xaa₈ is Glu; Xaa₉ is Leu, Ile, Lys, Arg, Trp, Tyr or Phe; Xaa₁₂ is Asn; Xaa₁₃ is Pro; Xaa₁₄ is Ala; Xaa₁₆ is Thr, Ala, Lys, Arg, Trp; Xaa₁₇ is Gly; Xaa₁₉ is Tyr or Leu; Xaa₁₉ is Lys or Arg; Xaa₂₀ Xaa₂₁ is AspPhe or is missing.

[0057] In a sixth aspect, the invention features a method for increasing the activity of an intestinal guanylate cyclase (GC-C) receptor in a patient, the method comprising: administering to the patient a composition comprising a purified polypeptide comprising the amino acid sequence (I): Xaa₁ Xaa₂ Xaa₃ Xaa₄ Xaa₅ Cys₆ Cys₇ Xaa₈ Xaa₉ Cys₁₀ Cys₁₁ Xaa₁₂ Xaa₁₃ Xaa₁₄ Cys₁₅ Xaa₁₆ Xaa₁₇ Cys₁₈ Xaa₁₉ Xaa₂₀ Xaa₂₁ (SEQ ID NO:1674) wherein: Xaa₁ Xaa₂ Xaa₃ Xaa₄ Xaa₅ is Asn Ser Ser Asn Tyr (SEQ ID NO:126) or is missing or Xaa₁ Xaa₂ Xaa₃ Xaa₄ is missing and Xaa₅ is Asn, Trp, Tyr, Asp, Ile, Thr, or Phe; Xaa₈ is Glu, Asp, Gln, Gly or Pro; Xaa₉ is Leu, Ile, Val, Ala, Lys, Arg, Trp, Tyr or Phe; Xaa₁₂ is Asn, Tyr, Asp or Ala; Xaa₁₃ is Pro or Gly; Xaa₁₄ is Ala, Leu, Ser, Gly, Val, Glu, Gln, Ile, Leu, Lys, Arg, and Asp; Xaa₁₆ is Thr, Ala, Asn, Lys, Arg, Trp; Xaa₁₇ is Gly, Pro or Ala; Xaa₁₉ is Trp, Tyr, Phe or Leu; Xaa₁₉ is Lys or Arg; Xaa₂₀ Xaa₂₁ is AspPhe or is missing or Xaa₂₀ is Asn or Glu and Xaa₂₁ is missing or Xaa₁₉ Xaa₂₀ Xaa₂₁ is missing.

[0058] In one embodiment the peptide comprises the amino acid sequence (I): Xaa₁ Xaa₂ Xaa₃ Xaa₄ Xaa₅ Cys₆ Cys₇ Xaa₈ Xaa₉ Cys₁₀ Cys₁₁ Xaa₁₂ Xaa₁₃ Xaa₁₄ Cys₁₅ Xaa₁₆ Xaa₁₇ Cys₁₈ Xaa₁₉ Xaa₂₀Xaa₂₁ (SEQ ID NO:1675) wherein: Xaa₁ Xaa₂ Xaa₃ Xaa₄ Xaa₅ is missing; Xaa₈ is Glu; Xaa₉ is Leu, Ile, Lys, Arg, Trp, Tyr or Phe; Xaa₁₂ is Asn; Xaa₁₃ is Pro; Xaa₁₄ is Ala; Xaa₁₆ is Thr, Ala, Lys, Arg, Trp; Xaa₁₇ is Gly; Xaa₁₉ is Tyr or Leu; Xaa₁₉ is Lys or Arg; Xaa₂₀ Xaa₂₁ is AspPhe or is missing.

[0059] In a seventh aspect, the invention features an isolated nucleic acid molecule comprising a nucleotide sequence encoding a polypeptide comprising the amino acid sequence: (I): Xaa₁ Xaa₂ Xaa₃ Xaa₄ Xaa₅ Cys₆ Cys₇ Xaa₈ Xaa₉ Cys₁₀ Cys₁₁ Xaa₁₂ Xaa₁₃ Xaa₁₄ Cys₁₅ Xaa₁₆ Xaa₁₇ Cys₁₈ Xaa₁₉ Xaa₂₀ Xaa₂₁ (SEQ ID NO:1674) wherein: Xaa₁ Xaa₂ Xaa₃ Xaa₄ Xaa₅ is Asn Ser Ser Asn Tyr (SEQ ID NO:126) or is missing or Xaa₁ Xaa₂ Xaa₃ Xaa₄ is missing and Xaa₅ is Asn, Trp, Tyr, Asp, Ile, Thr, or Phe; Xaa₈ is Glu, Asp, Gln, Gly or Pro; Xaa₉ is Leu, Ile, Val, Ala, Lys, Arg, Trp, Tyr or Phe; Xaa₁₂ is Asn, Tyr, Asp or Ala; Xaa₁₃ is Pro or Gly; Xaa₁₄ is Ala, Leu, Ser, Gly, Val, Glu, Gln, Ile, Leu, Lys, Arg, and Asp; Xaa₁₆ is Thr, Ala, Asn, Lys, Arg, Trp; Xaa₁₇ is Gly, Pro or Ala; Xaa₁₉ is Trp, Tyr, Phe or Leu; Xaa₁₉ is Lys orArg; Xaa₂₀ Xaa₂₁ is AspPhe or is missing or Xaa₂₀ is Asn or Glu and Xaa₂l is missing or Xaa₁₉ Xaa₂₀ Xaa₂₁ is missing.

[0060] In one embodiment the peptide comprises the amino acid sequence (I): Xaa₁ Xaa₂ Xaa₃ Xaa₄ Xaa₅ Cys₆ Cys₇ Xaa₈ Xaa₉ Cys₁₀ Cys₁₁ Xaa₁₂ Xaa₁₃ Xaa₁₄ Cys₁₅ Xaa₁₆ Xaa₁₇ Cys₁₈ Xaa₁₉ Xaa₂₀ Xaa₂₁ (SEQ ID NO:1675) wherein: Xaa₁ Xaa₂ Xaa₃ Xaa₄ Xaa₅ is missing; Xaa₈ is Glu; Xaa₉ is Leu, Ile, Lys, Arg, Trp, Tyr or Phe; Xaa₁₂ is Asn; Xaa₁₃ is Pro; Xaa₁₄ is Ala; Xaa₁₆ is Thr, Ala, Lys, Arg, Trp; Xaa₁₇ is Gly; Xaa₁₉ is Tyr or Leu; Xaa₁₉ is Lys or Arg; Xaa₂₀ Xaa₂₁ is AspPhe or is missing.

[0061] In an eighth aspect the invention features a method for treating constipation, the method comprising administering an agonist of the intestinal guanylate cyclase (GC-C) receptor. In various embodiments: the agonist is a peptide, the peptide includes two Cys that form one disulfide bond, the peptide includes four Cys that form two disulfide bonds, and the peptide includes six Cys that form three disulfide bonds.

[0062] In a ninth aspect, the invention features a method for treating a gastrointestinal disorder, a gastrointestinal motility disorder, irritable bowel syndrome, chronic constipation, a functional gastrointestinal disorder, gastroesophageal reflux disease, duodenogastric reflux, functional heartburn, dyspepsia, functional dyspepsia, nonulcer dyspepsia, gastroparesis, chronic intestinal pseudo-obstruction, colonic pseudo-obstruction, Crohn's disease, ulcerative colitis, Inflammatory bowel disease, obesity, congestive heart failure, or benign prostatic hyperplasia, the method comprising administering an agonist of the intestinal guanylate cyclase (GC-C) receptor either orally, by rectal suppository, or parenterally. In various embodiments: the agonist is a peptide, the peptide includes two Cys that form one disulfide bond, the peptide includes four Cys that form two disulfide bonds, and the peptide includes six Cys that form three disulfide bonds.

[0063] In a tenth aspect, the invention features a method for treating a gastrointestinal disorder selected from the group consisting of: a gastrointestinal motility disorder, irritable bowel syndrome, chronic constipation, a functional gastrointestinal disorder, gastroesophageal reflux disease, duodenogastric reflux, functional heartburn, dyspepsia, functional dyspepsia, nonulcer dyspepsia, gastroparesis, chronic intestinal pseudo-obstruction, colonic pseudo-obstruction, Crohn's disease, ulcerative colitis, Inflammatory bowel disease, the method comprising administering an agonist of the intestinal guanylate cyclase (GC-C) receptor. In various embodiments the composition is administered orally; the peptide comprises 30 or fewer amino acids, the peptide comprises 20 or fewer amino acids, and the peptide comprises no more than 5 amino acids prior to Cys₅.

[0064] In various embodiments: the agonist is a peptide, the peptide includes two Cys that form one disulfide bond, the peptide includes four Cys that form two disulfide bonds, and the peptide includes six Cys that form three disulfide bonds.

[0065] In an eleventh aspect, the invention features a method for treating obesity, the method comprising administering an agonist of the intestinal guanylate cyclase (GC-C) receptor. In various embodiments: the agonist is a peptide, the peptide includes two Cys that form one disulfide bond, the peptide includes four Cys that form two disulfide bonds, and the peptide includes six Cys that form three disulfide bonds.

[0066] In a twelfth aspect, the invention features a method for treating obesity, the method comprising administering a polypeptide comprising the amino acid sequence: (I): Xaa₁ Xaa₂ Xaa₃ Xaa₄ Xaa₅ Cys₆ Cys₇ Xaa₈ Xaa₉ Cys₁₀ Cys₁₁ Xaa₁₂ Xaa₁₃ Xaa₁₄ Cys₁₅ Xaa₁₆ Xaa₁₇ Cys₁₈ Xaa₁₉ Xaa₂₀ Xaa₂₁ (SEQ ID NO:1674)wherein: Xaa₁ Xaa₂ Xaa₃ Xaa₄ Xaa₅ is Asn Ser Ser Asn Tyr (SEQ ID NO:126) or is missing or Xaa₁ Xaa₂ Xaa₃ Xaa₄ is missing and Xaa₅ is Asn, Trp, Tyr, Asp, Ile, Thr, or Phe; Xaa₈ is Glu, Asp, Gln, Gly or Pro; Xaa₉ is Leu, Ile, Val, Ala, Lys, Arg, Trp, Tyr or Phe; Xaa₁₂ is Asn, Tyr, Asp or Ala; Xaa₁₃ is Pro or Gly; Xaa₁₄ is Ala, Leu, Ser, Gly, Val, Glu, Gln, Ile, Leu, Lys, Arg, and Asp; Xaa₁₆ is Thr, Ala, Asn, Lys, Arg, Trp; Xaa₁₇ is Gly, Pro or Ala; Xaa₁₉ is Trp, Tyr, Phe or Leu; and Xaa₂₀ Xaa₂₁ is AspPhe or is missing or Xaa₂₀ is Asn or Glu and Xaa₂₁ is missing or Xaa₁₉ Xaa₂₀ Xaa₂₁ is missing. The peptide can be administered alone or in combination with one or more agents for the treatment of obesity, e.g., sibutramine or another agent, e.g., an agent described herein.

[0067] In one embodiment the peptide comprises the amino acid sequence (I): Xaa₁ Xaa₂ Xaa₃ Xaa₄ Xaa₅ Cys₆ Cys₇ Xaa₈ Xaa₉ Cys₁₀ Cys₁₁ Xaa₁₂ Xaa₁₃ Xaa₁₄ Cys₁₅ Xaa₁₆ Xaa₁₇ Cys₁₈ Xaa₁₉ Xaa₂₀ Xaa₂₁ (SEQ ID NO:1675) wherein: Xaa₁ Xaa₂ Xaa₃ Xaa₄ Xaa₅ is missing; Xaa₈ is Glu; Xaa₉ is Leu, Ile, Lys, Arg, Trp, Tyr or Phe; Xaa₁₂ is Asn; Xaa₁₃ is Pro; Xaa₁₄ is Ala; Xaa₁₆ is Thr, Ala, Lys, Arg, Trp; Xaa₁₇ is Gly; Xaa₁₉ is Tyr or Leu; and Xaa₂₀ Xaa₂l is AspPhe or is missing.

[0068] In a thirteenth aspect, the invention features a composition comprising a polypeptide described herein. In one embodiment, the composition is a pharmaceutical composition.

[0069] In a fourteenth aspect, the invention features a method for treating congestive heart failure, the method comprising: administering to the patient a composition comprising a purified polypeptide comprising the amino acid sequence (I): Xaa₁ Xaa₂ Xaa₃ Xaa₄ Xaa₅ Cys₆ Cys₇ Xaa₈ Xaa₉ Cys₁₀ Cys₁₁ Xaa₁₂ Xaa₁₃ Xaa₁₄ Cys₁₅ Xaa₁₆ Xaa₁₇ Cys₁₈ Xaa₁₉ Xaa₂₀ Xaa₂₁ (SEQ ID NO:1674) wherein: Xaa₁ Xaa₂ Xaa₃ Xaa₄ Xaa₅ is Asn Ser Ser Asn Tyr (SEQ ID NO:126) or is missing or Xaa₁ Xaa₂ Xaa₃ Xaa₄ is missing and Xaa₅ is Asn, Trp, Tyr, Asp, Ile, Thr, or Phe; Xaa₈ is Glu, Asp, Gln, Gly or Pro; Xaa₉ is Leu, Ile, Val, Ala, Lys, Arg, Trp, Tyr or Phe; Xaa₁₂ is Asn, Tyr, Asp or Ala; Xaa₁₃ is Pro or Gly; Xaa₁₄ is Ala, Leu, Ser, Gly, Val, Glu, Gln, Ile, Leu, Lys, Arg, and Asp; Xaa₁₆ is Thr, Ala, Asn, Lys, Arg, Trp; Xaa₁₇ is Gly, Pro or Ala; Xaa₁₉ is Trp, Tyr, Phe or Leu; and Xaa₂₀ Xaa₂₁ is AspPhe or is missing or Xaa₂₀ is Asn or Glu and Xaa₂₁ is missing or Xaa₁₉ Xaa₂₀ Xaa₂₁ is missing. The peptide can be administered in combination with one or more agents for treatment of congestive heart failure, for example, a natriuretic peptide such as atrial natriuretic peptide, brain natriuretic peptide or C-type natriuretic peptide), a diuretic, or an inhibitor of angiotensin converting enzyme.

[0070] In one embodiment the peptide comprises the amino acid sequence (I): Xaa₁ Xaa₂ Xaa₃ Xaa₄ Xaa₅ Cys₆ Cys₇ Xaa₈ Xaa₉ Cys₁₀ Cys₁₁ Xaa₁₂ Xaa₁₃ Xaa₁₄ Cys₁₅ Xaa₁₆ Xaa₁₇ Cys₁₈ Xaa₁₉ Xaa₂₀ Xaa₂₁ (SEQ ID NO:1675) wherein: Xaa₁ Xaa₂ Xaa₃ Xaa₄ Xaa₅ is missing; Xaa₈ is Glu; Xaa₉ is Leu, Ile, Lys, Arg, Trp, Tyr or Phe; Xaa₁₂ is Asn; Xaa₁₃ is Pro; Xaa₁₄ is Ala; Xaa₁₆ is Thr, Ala, Lys, Arg, Trp; Xaa₁₇ is Gly; Xaa₁₉ is Tyr or Leu; Xaa₁₉ is Lys or Arg; Xaa₂₀ Xaa₂₁ is AspPhe or is missing.

[0071] In a fifteenth aspect, the invention features a method for treating benign prostatic hyperplasia, the method comprising: administering to the patient a composition comprising a purified polypeptide comprising the amino acid sequence (I): Xaa₁ Xaa₂ Xaa₃ Xaa₄ Xaa₅ Cys₆ Cys₇ Xaa₈ Xaa₉ Cys₁₀ Cys₁₁ Xaa₁₂ Xaa₁₃ Xaa₁₄ Cys₁₅ Xaa₁₆ Xaa₁₇ Cys₁₈ Xaa₁₉ Xaa₂₀ Xaa₂₁ (SEQ ID NO:1674) wherein: Xaa₁ Xaa₂ Xaa₃ Xaa₄ Xaa₅ is Asn Ser Ser Asn Tyr (SEQ ID NO:126) or is missing or Xaa₁ Xaa₂ Xaa₃ Xaa₄ is missing and Xaa₅ is Asn, Trp, Tyr, Asp, Ile, Thr, or Phe; Xaa₈ is Glu, Asp, Gln, Gly or Pro; Xaa₉ is Leu, Ile, Val, Ala, Lys, Arg, Trp, Tyr or Phe; Xaa₁₂ is Asn, Tyr, Asp or Ala; Xaa₁₃ is Pro or Gly; Xaa₁₄ is Ala, Leu, Ser, Gly, Val, Glu, Gln, Ile, Leu, Lys, Arg, and Asp; Xaa₁₆ is Thr, Ala, Asn, Lys, Arg, Trp; Xaa₁₇ is Gly, Pro or Ala; Xaa₁₉ is Trp, Tyr, Phe or Leu; Xaa₁₉ is Lys or Arg; Xaa₂₀ Xaa₂₁ is AspPhe or is missing or Xaa₂₀ is Asn or Glu and Xaa₂₁ is missing or Xaa₁₉ Xaa₂₀ Xaa₂₁ is missing.

[0072] The peptide can be administered alone or in combination with another agent for treatment of BPH, for example, a 5-alpha reductase inhibitor (e.g., finasteride) or an alpha adrenergic inhibitor (e.g., doxazosine).

[0073] In one embodiment the peptide comprises the amino acid sequence (I): Xaa₁ Xaa₂ Xaa₃ Xaa₄ Xaa₅ Cys₆ Cys₇ Xaa₈ Xaa₉ Cys₁₀ Cys₁₁ Xaa₁₂ Xaa₁₃ Xaa₁₄ Cys₁₅ Xaa₁₆ Xaa₁₇ Cys₁₈ Xaa₁₉ Xaa₂₀ Xaa₂₁ (SEQ ID NO:1675) wherein: Xaa₁ Xaa₂ Xaa₃ Xaa₄ Xaa₅ is missing; Xaa₈ is Glu; Xaa₉ is Leu, Ile, Lys, Arg, Trp, Tyr or Phe; Xaa₁₂ is Asn; Xaa₁₃ is Pro; Xaa₁₄ is Ala; Xaa₁₆ is Thr, Ala, Lys, Arg, Trp; Xaa₁₇ is Gly; Xaa₁₉ is Tyr or Leu; and Xaa₂₀ Xaa₂₁ is AspPhe or is missing.

[0074] In a sixteenth aspect, the invention features a method for treating or reducing pain, including visceral pain, pain associated with a gastrointestinal disorder or pain associated with some other disorder, the method comprising: administering to a patient a composition comprising a purified polypeptide comprising the amino acid sequence (I): Xaa₁ Xaa₂ Xaa₃ Xaa₄ Xaa₅ Cys₆ Cys₇ Xaa₈ Xaa₉ Cys₁₀ Cys₁₁ Xaa₁₂ Xaa₁₃ Xaa₁₄ Cys₁₅ Xaa₁₆ Xaa₁₇ Cys₁₈ Xaa₁₉ Xaa₂₀ Xaa₂₁, e.g., a purified polypeptide comprising an amino acid sequence disclosed herein.

[0075] In one embodiment the peptide comprises the amino acid sequence (I): Xaa₁ Xaa₂ Xaa₃ Xaa₄ Xaa₅ Cys₆ Cys₇ Xaa₈ Xaa₉ Cys₁₀ Cys₁₁ Xaa₁₂ Xaa₁₃ Xaa₁₄ Cys₁₅ Xaa₁₆ Xaa₁₇ Cys₁₈ Xaa₁₉ Xaa₂₀ Xaa₂₁ (SEQ ID NO:1675) wherein: Xaa₁ Xaa₂ Xaa₃ Xaa₄ Xaa₅ is missing; Xaa₈ is Glu; Xaa₉ is Leu, Ile, Lys, Arg, Trp, Tyr or Phe; Xaa₁₂ is Asn; Xaa₁₃ is Pro; Xaa₁₄ is Ala; Xaa₁₆ is Thr, Ala, Lys, Arg, Trp; Xaa₁₇ is Gly; Xaa₁₉ is Tyr or Leu; and Xaa₂₀ Xaa₂₁ is AspPhe or is missing.

[0076] In a seventeenth aspect, the invention features a method for treating inflammation, including inflammation of the gastrointestinal tract, e.g., inflammation associated with a gastrointestinal disorder or infection or some other disorder, the method comprising: administering to a patient a composition comprising a purified polypeptide comprising the amino acid sequence (I): Xaa₁ Xaa₂ Xaa₃ Xaa₄ Xaa₅ Cys₆ Cys₇ Xaa₈ Xaa₉ Cys₁₀ Cys₁₁ Xaa₁₂ Xaa₁₃ Xaa₁₄ Cys₁₅ Xaa₁₆ Xaa₁₇ Cys₁₈ Xaa₁₉ Xaa₂₀ Xaa₂₁, e.g., a purified polypeptide comprising an amino acid sequence disclosed herein.

[0077] In certain embodiments the peptide includes a peptide comprising or consisting of the amino acid sequence Xaa₁ Xaa₂ Xaa₃ Xaa₄ Xaa₅ Cys Cys Glu Xaa₉ Cys Cys Asn Pro Ala Cys Thr Gly Cys Tyr Xaa₂₀ Xaa₂₁ (II) (SEQ ID NO:2) wherein Xaa₉ is any amino acid, wherein Xaa₉ is any amino acid other than Leu, wherein Xaa₉ is selected from Phe, Trp and Tyr; wherein Xaa₉ is selected from any other natural or non-natural aromatic amino acid, wherein Xaa₉ is Tyr; wherein Xaa₁ Xaa₂ Xaa₃ Xaa₄ Xaa₅ is Asn Ser Ser Asn Tyr; wherein Xaa₁, Xaa₂, Xaa₃, Xaa₄, and Xaa₅ are missing; wherein Xaa₁, Xaa₂, Xaa₃ and Xaa₄ are missing; wherein Xaa₁, Xaa₂ and Xaa₃ are missing; wherein Xaa₁ and Xaa₂ are missing; wherein Xaa₁ is missing; wherein Xaa₂₀ Xaa₂₁ is AspPhe or is missing or Xaa₂₀ is Asn or Glu and Xaa₂₁ is missing or Xaa₁₉ Xaa₂₀ Xaa₂₁ is missing; wherein Xaa₁ Xaa₂ Xaa₃ Xaa₄ Xaa₅ and Tyr Xaa₂₀ Xaa₂₁ are missing. In the case of a peptide comprising the sequence (I): Xaa₁ Xaa₂ Xaa₃ Xaa₄ Xaa₅ Cys₆ Cys₇ Xaa₈ Xaa₉ Cys₁₀ Cys₁₁ Xaa₁₂ Xaa₁₃ Xaa₁₄ Cys₁₅ Xaa₁₆ Xaa₁₇ Cys₁₈ Xaa₁₉ Xaa₂₀ Xaa₂₁ wherein: Xaa₁ Xaa₂ Xaa₃ Xaa₄ Xaa₅ is missing and/or the sequence Xaa₁₉ Xaa₂₀ Xaa₂₁ is missing peptide can still contain additional carboxyterminal or amino terminal amino acids or both

[0078] Among the useful peptides are peptides comprising, consisting of or consisting essentially of the amino acid sequence Xaa₁ Xaa₂ Xaa₃ Xaa₄ Xaa₅ Cys Cys Glu Xaa₉ Cys Cys Asn Pro Ala Cys Thr Gly Cys Tyr Xaa₂₀ Xaa₂₁ (II) (SEQ ID NO:2) are the following peptides:

(SEQ ID NO:37)

Gln Ser Ser Asn Tyr Cys Cys Glu Tyr Cys Cys Asn
Pro Ala Cys Thr Gly Cys Tyr

(SEQ ID NO:38)

Asn Thr Ser Asn Tyr Cys Cys Glu Tyr Cys Cys Asn
Pro Ala Cys Thr Gly Cys Tyr

(SEQ ID NO:39)

Asn Leu Ser Asn Tyr Cys Cys Glu Tyr Cys Cys Asn
Pro Ala Cys Thr Gly Cys Tyr

(SEQ ID NO:40)

Asn Ile Ser Asn Tyr Cys Cys Glu Tyr Cys Cys Asn
Pro Ala Cys Thr Gly Cys Tyr

(SEQ ID NO:41)

Asn Ser Ser Gln Tyr Cys Cys Glu Tyr Cys Cys Asn
Pro Ala Cys Thr Gly Cys Tyr

(SEQ ID NO:42)

Ser Ser Asn Tyr Cys Cys Glu Tyr Cys Cys Asn Pro
Ala Cys Thr Gly Cys Tyr

(SEQ ID NO:43)

Gln Ser Ser Gln Tyr Cys Cys Glu Tyr Cys Cys Asn
Pro Ala Cys Thr Gly Cys Tyr

(SEQ ID NO:44)

Ser Ser Gln Tyr Cys Cys Glu Tyr Cys Cys Asn Pro
Ala Cys Thr Gly Cys Tyr.

(SEQ ID NO:45)

Asn Ser Ser Asn Tyr Cys Cys Glu Ala Cys Cys Asn
Pro Ala Cys Thr Gly Cys Tyr

(SEQ ID NO:46)

Asn Ser Ser Asn Tyr Cys Cys Glu Arg Cys Cys Asn
Pro Ala Cys Thr Gly Cys Tyr

(SEQ ID NO:47)

Asn Ser Ser Asn Tyr Cys Cys Glu Asn Cys Cys Asn
Pro Ala Cys Thr Gly Cys Tyr

(SEQ ID NO:48)

Asn Ser Ser Asn Tyr Cys Cys Glu Asp Cys Cys Asn
Pro Ala Cys Thr Gly Cys Tyr

(SEQ ID NO:49)

Asn Ser Ser Asn Tyr Cys Cys Glu Cys Cys Cys Asn
Pro Ala Cys Thr Gly Cys Tyr

(SEQ ID NO:50)

Asn Ser Ser Asn Tyr Cys Cys Glu Gln Cys Cys Asn
Pro Ala Cys Thr Gly Cys Tyr

(SEQ ID NO:51)

Asn Ser Ser Asn Tyr Cys Cys Glu Glu Cys Cys Asn
Pro Ala Cys Thr Gly Cys Tyr

(SEQ ID NO:52)

Asn Ser Ser Asn Tyr Cys Cys Glu Gly Cys Cys Asn
Pro Ala Cys Thr Gly Cys Tyr

(SEQ ID NO:53)

Asn Ser Ser Asn Tyr Cys Cys Glu His Cys Cys Asn
Pro Ala Cys Thr Gly Cys Tyr

(SEQ ID NO:54)

Asn Ser Ser Asn Tyr Cys Cys Glu Ile Cys Cys Asn
Pro Ala Cys Thr Gly Cys Tyr

(SEQ ID NO:55)

Asn Ser Ser Asn Tyr Cys Cys Glu Lys Cys Cys Asn
Pro Ala Cys Thr Gly Cys Tyr

(SEQ ID NO:56)

Asn Ser Ser Asn Tyr Cys Cys Glu Met Cys Cys Asn
Pro Ala Cys Thr Gly Cys Tyr

(SEQ ID NO:57)

Asn Ser Ser Asn Tyr Cys Cys Glu Phe Cys Cys Asn
Pro Ala Cys Thr Gly Cys Tyr

(SEQ ID NO:58)

Asn Ser Ser Asn Tyr Cys Cys Glu Pro Cys Cys Asn
Pro Ala Cys Thr Gly Cys Tyr

(SEQ ID NO:59)

Asn Ser Ser Asn Tyr Cys Cys Glu Ser Cys Cys Asn
Pro Ala Cys Thr Gly Cys Tyr

(SEQ ID NO:60)

Asn Ser Ser Asn Tyr Cys Cys Glu Thr Cys Cys Asn
Pro Ala Cys Thr Gly Cys Tyr

(SEQ ID NO:61)

Asn Ser Ser Asn Tyr Cys Cys Glu Trp Cys Cys Asn
Pro Ala Cys Thr Gly Cys Tyr

(SEQ ID NO:62)

Asn Ser Ser Asn Tyr Cys Cys Glu Val Cys Cys Asn
Pro Ala Cys Thr Gly Cys Tyr

(SEQ ID NO:63)

Cys Cys Glu Ala Cys Cys Asn Pro Ala Cys Thr Gly
Cys Tyr

(SEQ ID NO:64)

Cys Cys Glu Arg Cys Cys Asn Pro Ala Cys Thr Gly
Cys Tyr

(SEQ ID NO:65)

Cys Cys Glu Asn Cys Cys Asn Pro Ala Cys Thr Gly
Cys Tyr

(SEQ ID NO:66)

Cys Cys Glu Asp Cys Cys Asn Pro Ala Cys Thr Gly
Cys Tyr

(SEQ ID NO:67)

Cys Cys Glu Cys Cys Cys Asn Pro Ala Cys Thr Gly
Cys Tyr

(SEQ ID NO:68)

Cys Cys Glu Gln Cys Cys Asn Pro Ala Cys Thr Gly
Cys Tyr

(SEQ ID NO:69)

Cys Cys Glu Glu Cys Cys Asn Pro Ala Cys Thr Gly
Cys Tyr

(SEQ ID NO:70)

Cys Cys Glu Gly Cys Cys Asn Pro Ala Cys Thr Gly
Cys Tyr

(SEQ ID NO:71)

Cys Cys Glu His Cys Cys Asn Pro Ala Cys Thr Gly
Cys Tyr

(SEQ ID NO:72)

Cys Cys Glu Ile Cys Cys Asn Pro Ala Cys Thr Gly
Cys Tyr

(SEQ ID NO:73)

Cys Cys Glu Lys Cys Cys Asn Pro Ala Cys Thr Gly
Cys Tyr

(SEQ ID NO:74)

Cys Cys Glu Met Cys Cys Asn Pro Ala Cys Thr Gly
Cys Tyr

(SEQ ID NO:75)

Cys Cys Glu Phe Cys Cys Asn Pro Ala Cys Thr Gly
Cys Tyr

(SEQ ID NO:76)

Cys Cys Glu Pro Cys Cys Asn Pro Ala Cys Thr Gly
Cys Tyr

(SEQ ID NO:77)

Cys Cys Glu Ser Cys Cys Asn Pro Ala Cys Thr Gly
Cys Tyr

(SEQ ID NO:78)

Cys Cys Glu Thr Cys Cys Asn Pro Ala Cys Thr Gly
Cys Tyr

(SEQ ID NO:79)

Cys Cys Glu Trp Cys Cys Asn Pro Ala Cys Thr Gly
Cys Tyr

(SEQ ID NO:80)

Cys Cys Glu Val Cys Cys Asn Pro Ala Cys Thr Gly
Cys Tyr

(SEQ ID NO:81)

Cys Cys Glu Tyr Cys Cys Asn Pro Ala Cys Thr Gly
Cys

(SEQ ID NO:82)

Cys Cys Glu Ala Cys Cys Asn Pro Ala Cys Thr Gly
Cys

(SEQ ID NO:83)

Cys Cys Glu Arg Cys Cys Asn Pro Ala Cys Thr Gly
Cys

(SEQ ID NO:84)

Cys Cys Glu Asn Cys Cys Asn Pro Ala Cys Thr Gly
Cys

(SEQ ID NO:85)

Cys Cys Glu Asp Cys Cys Asn Pro Ala Cys Thr Gly
Cys

(SEQ ID NO:86)

Cys Cys Glu Cys Cys Cys Asn Pro Ala Cys Thr Gly
Cys

(SEQ ID NO:87)

Cys Cys Glu Gln Cys Cys Asn Pro Ala Cys Thr Gly
Cys

(SEQ ID NO:88)

Cys Cys Glu Glu Cys Cys Asn Pro Ala Cys Thr Gly
Cys

(SEQ ID NO:89)

Cys Cys Glu Gly Cys Cys Asn Pro Ala Cys Thr Gly
Cys

(SEQ ID NO:90)

Cys Cys Glu His Cys Cys Asn Pro Ala Cys Thr Gly
Cys

(SEQ ID NO:91)

Cys Cys Glu Ile Cys Cys Asn Pro Ala Cys Thr Gly
Cys

(SEQ ID NO:92)

Cys Cys Glu Lys Cys Cys Asn Pro Ala Cys Thr Gly
Cys

(SEQ ID NO:93)

Cys Cys Glu Met Cys Cys Asn Pro Ala Cys Thr Gly
Cys

(SEQ ID NO:94)

Cys Cys Glu Phe Cys Cys Asn Pro Ala Cys Thr Gly
Cys

(SEQ ID NO:95)

Cys Cys Glu Pro Cys Cys Asn Pro Ala Cys Thr Gly
Cys

(SEQ ID NO:96)

Cys Cys Glu Ser Cys Cys Asn Pro Ala Cys Thr Gly
Cys

(SEQ ID NO:97)

Cys Cys Glu Thr Cys Cys Asn Pro Ala Cys Thr Gly
Cys;

(SEQ ID NO:98)

Cys Cys Glu Trp Cys Cys Asn Pro Ala Cys Thr Gly
Cys

(SEQ ID NO:99)

Cys Cys Glu Val Cys Cys Asn Pro Ala Cys Thr Gly
Cys.

[0079] The invention also features deletion variants of any of the peptides described herein in which one, two, three or four amino acids (or non-natural amino acids or natural or non-natural amino acid analogs), other than a Cys (or an amino acid substituted for Cys, e.g, an amino acid capable of forming a covalent bond to another amino acid), are deleted. Where two (or more) amino acids are deleted and the peptide comprises the sequence: Cysₐ Cys_{b} Xaa Xaa Cys_{c} Cys_{d} Xaa Xaa Xaa Cysₑ Xaa Xaa Cys_{f}, in some embodiments two or more deletions can be located between Cys_{b} and Cys_{c} and/or between Cys_{d} and Cysₑ and/or between Cysₑ and Cys_{f}. However, in other embodiments there is at most one deletion between each of Cys_{b} and Cys_{c} or between Cys_{d} and Cysₑ or between Cysₑ and Cys_{f}. Thus, the invention includes any of the peptides described herein comprising the sequence Cysₐ Cys_{b} Xaa Xaa Cys_{c} Cys_{d} Xaa Xaa Xaa Cysₑ Xaa Xaa Cys_{f} wherein: a) one amino acid between Cys_{b} and Cys_{c} is deleted; b) one amino acid between Cys_{d} and Cysₑ is deleted; c) one amino acid between Cysₑ and Cys_{f} is deleted; d) one amino acid between Cys_{b} and Cys_{c} is deleted and one amino acid between Cys_{d} and Cysₑ is deleted; e) one amino acid between Cys_{d} and Cysₑ is deleted and one amino acid between Cysₑ and Cys_{f} is deleted; f) one amino acid between Cys_{b} and Cys_{c} is deleted and one amino acid between Cysₑ and Cys_{f} is deleted or g) one amino acid between Cys_{b} and Cys_{c} is deleted, one amino acid between Cys_{d} and Cysₑ is deleted and one amino acid between Cysₑ and Cys_{f} is deleted. In certain embodiments, the various deletion variants are peptides that bind to and/or activate the GC-C receptor.

[0080] Deletion variants of Cys Cys Glu Tyr Cys Cys Asn Pro Ala Cys Thr Gly Cys Tyr (SEQ ID NO:3) include the peptides listed in FIG. 11. In these deletion variants, any of the amino acids can be deleted and there can be one, two, three or four amino acids deleted other than Cys. Additional variants include those in which a Cys is substituted by an amino acid capable of forming a covalent linkage with another amino acid (e.g, a Cys or a substitute therefore). Such amino acids include: Mpt (mercaptoproline) or Pen (penicillamine) or Dpr (diaminopropionic acid)

[0081] The invention also features insertion variants of any of the peptides described herein in which one, two, three or four amino acids (e.g., Gly or Ala) are inserted before or after any amino acid in the peptide. In some embodiments no more than one amino acid is inserted between two Cys. For example, where two or more amino acids are inserted and the peptide comprises the sequence Cysₐ Cys_{b} Xaa Xaa Cys_{c} Cys_{d} Xaa Xaa Xaa Cysₑ Xaa Xaa Cys_{f}, in some embodiments two or more insertions can be located between Cys_{b} and Cys_{c} or between Cys_{d} and Cysₑ or between Cysₑ and Cys_{f}. However, in other embodiments no more than one insertion is located between Cys_{b} and Cys_{c} or between Cys_{d} and Cysₑ or between Cysₑ and Cys_{f}. Thus, the invention features any of the peptides described herein comprising the sequence Cysₐ Cys_{b} Xaa Xaa Cys_{c} Cys_{d} Xaa Xaa Xaa Cysₑ Xaa Xaa Cys_{f} wherein: a) one amino acid is inserted between Cys_{b} and Cys_{c}; b) one amino acid is inserted between Cys_{d} and Cysₑ; c) one amino acid is inserted between Cysₑ and Cys_{f}; d) one amino acid is inserted between Cys_{b} and Cys_{c} and one amino acid is inserted between Cys_{d} and Cysₑ; e) one amino acid is inserted between Cys_{d} and Cysₑ and one amino acid is inserted between Cysₑ and Cys_{f}; f) one amino acid is inserted between Cys_{b} and Cys_{c} and one amino acid is inserted between Cysₑ and Cys_{f}; or g) one amino acid is inserted between Cys_{b} and Cys_{c}, one amino acid is inserted between Cys_{d} and Cysₑ and one amino acid is inserted between Cysₑ and Cys_{f}. In addition, one or more amino acids can be inserted preceding Cysₐ and/or one or more amino acids can be inserted following Cys_{f}.

[0082] In various embodiments, the insertion variants are peptides that bind to and/or activate the GC-C receptor.

[0083] Insertion variants of Cys Cys Glu Tyr Cys Cys Asn Pro Ala Cys Thr Gly Cys Tyr (SEQ ID NO:3) include those in which up to four amino acids (i.e., 0, 1, 2, 3 or 4) can be inserted after each amino acid. Thus, the invention includes peptides having the sequence: Cys Xaa₍₀₋₄₎ Cys Xaa₍₀₋₄₎ Glu Xaa₍₀₋₄₎ Tyr Xaa₍₀₋₄₎ Cys Xaa₍₀₋₄₎ Cys Xaa₍₀₋₄₎ Asn Xaa₍₀₋₄₎ Pro Xaa₍₀₋₄₎ Ala Xaa₍₀₋₄₎ Cys Xaa₍₀₋₄₎ Thr Xaa₍₀₋₄₎ Gly Xaa₍₀₋₄₎ Cys Xaa₍₀₋₄₎ Tyr Xaa₍₀₋₄₎₎ (SEQ ID NO:129). The inserted amino acids can be any amino acid (natural or non-natlural) and can be the same or different. In certain embodiments the inserted amino acids are all Gly or all Ala or a combination of Gly and Ala.

[0084] FIG. 12 depicts insertion variants of the peptide having the sequence: Cys Cys Glu Tyr Cys Cys Asn Pro Ala Cys Thr Gly Cys Tyr (SEQ ID NO:3).

[0085] The invention also features variants of peptides having the sequence Xaa₁ Xaa₂ Xaa₃ Xaa₄ Xaa₅ Cys₆ Cys₇ Xaa₈ Xaa₉ Cys₁₀ Cys₁₁ Xaa₁₂ Xaa₁₃ Xaa₁₄ Cys₁₅ Xaa₁₆ Xaa₁₇ Cys₁₈ Xaa₁₉ Xaa₂₀ Xaa₂₁ (SEQ ID NO:1), e.g., variants of Cys Cys Glu Tyr Cys Cys Asn Pro Ala Cys Thr Gly Cys Tyr (SEQ ID NO:3), in which up to four amino acids are deleted and/or up to four amino acids are inserted. The insertions and deletions can be between Cys₆ and Cys₁₈ in SEQ ID NO:1 or they can be amino terminal to Cys₆ and/or carboxy terminal to Cys₁₈ in SEQ ID NO:1.

[0086] In an eighteenth aspect, the invention features a method for treating congestive heart failure, the method comprising administering a complete or partial agonist of the intestinal guanylate cyclase (GC-C) receptor. The agonist can be administered alone or in combination with another agent for treatment of congestive heart failure, for example, a natriuretic peptide such as atrial natriuretic peptide, brain natriuretic peptide or C-type natriuretic peptide), a diuretic, or an inhibitor of angiotensin converting enzyme.

[0087] In a nineteenth aspect, the invention features a method for treating BPH, the method comprising administering a complete or partial agonist of the intestinal guanylate cyclase (GC-C) receptor. The agonist can be administered alone or in combination with another agent for treatment of BPH, for example, a 5-alpha reductase inhibitor (e.g., finasteride) or an alpha adrenergic inhibitor (e.g., doxazosine).

[0088] In a twentieth aspect, the invention features a method for treating obesity, the method comprising administering a complete or partial agonist of the intestinal guanylate cyclase (GC-C) receptor. The agonist can be administered alone or in combination with one or more agents for treatment of obesity, for example, gut hormone fragment peptide YY₃₋₃₆ (PYY₃₋₃₆)(N. Engl. J. Med. 349:941, 2003; ikpeapge daspeelnry yaslrhylnl vtrqry) or a variant thereof, glp-1 (glucagon-like peptide-1), exendin-4 (an inhibitor of glp-1), sibutramine, phentermine, phendimetrazine, benzphetamine hydrochloride (Didrex), orlistat (Xenical), diethylpropion hydrochloride (Tenuate), fluoxetine (Prozac), bupropion, ephedra, chromium, garcinia cambogia, benzocaine, bladderwrack (focus vesiculosus), chitosan, nomame herba, galega (Goat's Rue, French Lilac), conjugated linoleic acid, L-carnitine, fiber (psyllium, plantago, guar fiber), caffeine, dehydroepiandrosterone, germander (teucrium chamaedrys), B-hydroxy-β-methylbutyrate, ATL-962 (Alizyme PLC),and pyruvate. A peptide useful for treating obesity can be administered as a co-therapy with a peptide of the invention either as a distinct molecule or as part of a fusion protein with a peptide of the invention. Thus, for example, PYY₃₋₃₆ can be fused to the carboxy or amino terminus of a peptide of the invention. Such a fusion protein can include a chymostrypsin or trypsin cleavage site that can permit cleavage to separate the two peptides. A peptide useful for treating obesity can be administered as a co-therapywith electrostimulation (U.S. 20040015201).

[0089] In a twenty-first aspect, the invention features isolated nucleic acid molecules comprising a sequence encoding a peptide of the invention. Also within the invention are vectors, e.g., expression vectors that include such nucleic acid molecules and can be used to express a peptide of the invention in a cultured cell (e.g., a eukaryotice cell or a prokaryotic cell). The vector can further include one or more regulatory elements, e.g., a heterologous promoter or elements required for translation operably linked to the sequence encoding the peptide. In some cases the nucleic acid molecule will encode an amino acid sequence that includes the amino acid sequence of a peptide of the invention. For example, the nucleic acid molecule can encode a preprotein or a preproprotein that can be processed to produce a peptide of the invention.

[0090] A vector that includes a nucleotide sequence encoding a peptide of the invention or a peptide or polypeptide comprising a peptide of the invention may be either RNA or DNA, single- or double-stranded, prokaryotic, eukaryotic, or viral. Vectors can include transposons, viral vectors, episomes, (e.g., plasmids), chromosomes inserts, and artificial chromosomes (e.g. BACs or YACs). Suitable bacterial hosts for expression of the encode peptide or polypeptide include, but are not limited to, E. coli. Suitable eukaryotic hosts include yeast such as S. cerevisiae, other fungi, vertebrate cells, invertebrate cells (e.g., insect cells), plant cells, human cells, human tissue cells, and whole eukaryotic organisms. (e.g., a transgenic plant or a transgenic animal). Further, the vector nucleic acid can be used to generate a virus such as vaccinia or baculovirus.

[0091] As noted above the invention includes vectors and genetic constructs suitable for production of a peptide of the invention or a peptide or polypeptide comprising such a peptide. Generally, the genetic construct also includes, in addition to the encoding nucleic acid molecule, elements that allow expression, such as a promoter and regulatory sequences. The expression vectors may contain transcriptional control sequences that control transcriptional initiation, such as promoter, enhancer, operator, and repressor sequences. A variety of transcriptional control sequences are well known to those in the art and may be functional in, but are not limited to, a bacterium, yeast, plant, or animal cell. The expression vector can also include a translation regulatory sequence (e.g., an untranslated 5′ sequence, an untranslated 3′ sequence, a poly A addition site, or an internal ribosome entry site), a splicing sequence or splicing regulatory sequence, and a transcription termination sequence. The vector can be capable of autonomous replication or it can integrate into host DNA.

[0092] The invention also includes isolated host cells harboring one of the forgoing nucleic acid molecules and methods for producing a peptide by culturing such a cell and recovering the peptide or a precursor of the peptide. Recovery of the peptide or precursor may refer to collecting the growth solution and need not involve additional steps of purification. Proteins of the present invention, however, can be purified using standard purification techniques, such as, but not limited to, affinity chromatography, thermaprecipitation, immunoaffinity chromatography, ammonium sulfate precipitation, ion exchange chromatography, filtration, electrophoresis and hydrophobic interaction chromatography.

[0093] In a twenty-second aspect, the invention features a method of increasing the level of cyclic guanosine 3′ -monophosphate (cGMP) in an organ, tissue (e.g, the intestinal mucosa), or cell (e.g., a cell bearing GC-A receptor) by administering a composition that includes a peptide of the invention.

[0094] In a twenty-third aspect, the invention features polypeptides comprising, consisting or consisting essentially of the amino acid sequence Xaa_{l Xaa}₂ Xaa₃ Xaa₄ Xaa₅ Cys₆ Cys₇ Xaa₈ Xaa₉ Cys₁₀ Cys₁₁ Xaa₁₂ Xaa₁₃ Xaa₁₄ Cys₁₅ Xaa₁₆ Xaa₁₇ Cys₁₈ Xaa₁₉ Xaa₂₀ Xaa₂₁ wherein: a) Xaa₈ or Xaa₉ is not present; b) neither Xaa₈ or Xaa₉ is present; c) one of Xaa₁₂, Xaa₁₃ and Xaa₁₄ is not present; d) two of Xaa₁₂, Xaa₁₃ and Xaa₁₄ are not present; e) three of Xaa₁₂, Xaa₁₃ and Xaa₁₄ are not present; f) one of Xaa₁₆ and Xaa₁₇ is not present; g) neither Xaa₁₆ or Xaa₁₇ is present and combinations thereof. In various embodiments, one, two, three, four or five of Xaa₁ Xaa₂ Xaa₃ Xaa₄ and Xaa₅ are not present. In other embodiments, one, two or three or Xaa₁₉ Xaa₂₀ and Xaa₂₁ are missing.

[0095] The peptides and agonist of the intestinal guanylate cyclase (GC-C) receptor can be used to treat constipation or decreased intestinal motility, slow digestion or slow stomach emptying. The peptides can be used to relieve one or more symptoms of IBS (bloating, pain, constipation), GERD (acid reflux into the esophagus), duodenogastric reflux, functional dyspepsia, or gastroparesis (nausea, vomiting, bloating, delayed gastric emptying) and other disorders described herein.

[0096] The details of one or more embodiments of the invention are set forth in the accompanying description. All of the publications, patents and patnet applications are hereby incorporated by reference.

### FIGURES

[0097] FIG. 1 depicts the results of LCMS analysis of recombinant SEQ ID NO:4 peptide and SEQ ID NO:5 peptide.

[0098] FIGS. 1b and c depict the results of LCMS analysis of synthetic SEQ ID NO:3 peptide and the blank.

[0099] FIG. 2 depicts the results of the intestinal GC-C receptor activity assay of synthetic SEQ ID NO:4 peptide, SEQ ID NO:5 peptide and two different SEQ ID NO:3 peptides.

[0100] FIG. 3a depicts the effect of recombinant SEQ ID NO:4 peptide and Zelnorm® in an acute murine gastrointestinal transit model.

[0101] FIG. 3b depicts the effect of synthetic SEQ ID NO:3 peptide and Zelnorm® in an acute murine gastrointestinal transit model.

[0102] FIGS. 4a and 4b depict the effect of peptides SEQ ID NO:5, SEQ ID NO:3, and SEQ ID NO:4 in an acute murine gastrointestinal transit model.

[0103] FIG. 4c depicts the effect of SEQ ID NO:3 peptide in a chronic murine gastrointestinal transit model.

[0104] FIG. 5a depicts the effect of SEQ ID NO:4 peptide and Zelnorm® in a suckling mouse intestinal secretion model.

[0105] FIG. 5b depicts the effects of SEQ ID NO:3 and Zelnorm® in a mouse intestinal secretion model.

[0106] FIGS. 6a and 6b depict the effects of SEQ ID NO:4, SEQ ID NO:3 and SEQ ID NO:5 peptides in a mouse intestinal secretion model.

[0107] FIG. 7 shows the results of experiment in which SEQ ID NO:3 activity was analyzed in the TNBS colonic distention model.

[0108] FIGS. 8a and 8b show the effects of differing doses of SEQ ID NO:5 and SEQ ID NO:3 in the PBQ writhing assay.

[0109] FIG. 9 shows the results of Kd determination analysis using SEQ ID NO:3 in a competitive radioligand binding assay.

[0110] FIGS. 10a and 10b show bioavailability data for IV and orally administered SEQ ID NO:3 as detected by an ELISA assay and LCMS.

[0111] FIG. 11 depicts deletion variants of a peptide having the sequence: Cys Cys Glu Tyr Cys Cys Asn Pro Ala Cys Thr Gly Cys Tyr (SEQ ID NO:3).

[0112] FIG. 12 depicts insertion variants of a peptide having the sequence: Cys Cys Glu Tyr Cys Cys Asn Pro Ala Cys Thr Gly Cys Tyr (SEQ ID NO:3).

### DETAILED DESCRIPTION

[0113] The peptides of the invention bind to the intestinal guanylate cyclase (GC-C) receptor, a key regulator of fluid and electrolyte balance in the intestine. When stimulated, this receptor, which is located on the apical membrane of the intestinal epithelial surface, causes an increase in intestinal epithelial cyclic GMP (cGMP). This increase in cGMP is believed to cause a decrease in water and sodium absorption and an increase in chloride and potassium ion secretion, leading to changes in intestinal fluid and electrolyte transport and increased intestinal motility. The intestinal GC-C receptor possesses an extracellular ligand binding region, a transmembrane region, an intracellular protein kinase-like region and a cyclase catalytic domain. Proposed functions for the GC-C receptor are fluid and electrolyte homeostasis, the regulation of epithelial cell proliferation and the induction of apoptosis (Shalubhai 2002 Curr Opin Drug Dis Devel 5:261-268).

[0114] In addition to being expressed in the intestine by gastrointestinal epithelial cells, GC-C is expressed in extra-intestinal tissues including kidney, lung, pancreas, pituitary, adrenal, developing liver and gall bladder (reviewed in Vaandrager 2002 Mol Cell Biochem 230:73-83, Kulaksiz et al. 2004, Gastroenterology 126:732-740) and male and female reproductive tissues (reviewed in Vaandrager 2002 Mol Cell Biochem 230:73-83)) This suggests that the GC-C receptor agonists can be used in the treatment of disorders outside the GI tract, for example, congestive heart failure and benign prostatic hyperplasia.

[0115] Ghrelin, a peptide hormone secreted by the stomach, is a key regulator of appetite in humans. Ghrelin expression levels are regulated by fasting and by gastric emptying (Kim et al. 2003 Neuroreprt 14:1317-20; Gualillo et al. 2003 FEBS Letts 552: 105-9). Thus, by increasing 1 5 gastrointestinal motility, GC-C receptor agonists may also be used to regulate obesity.

[0116] In humans, the GC-C receptor is activated by guanylin (Gn) (U.S. Pat. No. 5,96,097), uroguanylin (Ugn) (U.S. Pat. No. 5,140,102) and lymphoguanylin (Forte et al. 1999 Endocrinology 140:1800-1806). Interestingly, these agents are 10-100 fold less potent than a class of bacterially derived peptides, termed ST (reviewed in Gianella 1995 J Lab Clin Med 125:173-181). ST peptides are considered super agonists of GC-C and are very resistant to proteolytic degradation.

[0117] ST peptide is capable of stimulating the enteric nervous system (Rolfe et al., 1994, J Physiolo 475: 531-537; Rolfe et al. 1999 Gut 44: 615-619; Nzegwu et al. 1996 Exp Physiol 81: 313-315). Also, cGMP has been reported to have anitnociceptive effects in multiple animal models of pain (Lazaro Ibanez et al. 2001 Eur J Pharmacol 426: 39-44; Soares et al. 2001 British J Pharmacol 134: 127-131; Jain et al. 2001 Brain Res 909:170-178; Amarante et al. 2002 Eur J Pharmacol 454:19-23). Thus, GC-C agonists may have both an analgesic as well an anti-inflammatory effect.

[0118] In bacteria, ST peptides are derived from a preproprotein that generally has at least 70 amino acids. The pre and pro regions are cleaved as part of the secretion process, and the resulting mature protein, which generally includes fewer than 20 amino acids, is biologically active.

[0119] Among the known bacterial ST peptides are: E. coli ST Ib (Moseley et al. 1983 Infect. Immun. 39:1167) having the mature amino acid sequence Asn Ser Ser Asn Tyr Cys Cys Glu Leu Cys Cys Asn Pro Ala Cys Thr Gly Cys Tyr (SEQ ID NO:100); E. coli ST Ia (So and McCarthy 1980 Proc. Natl. Acad. Sci. USA 77:4011) having the mature amino acid sequence Asn Thr Phe Tyr Cys Cys Glu Leu Cys Cys Asn Pro Ala Cys Ala Gly Cys Tyr (SEQ ID NO:101); E. coli ST I* (Chan and Giannella 1981 J. Biol. Chem. 256:7744) having the mature amino acid sequence Asn Thr Phe Tyr Cys Cys Glu Leu Cys Cys Tyr Pro Ala Cys Ala Gly Cys Asn (SEQ ID NO:102); C.freundii ST peptide (Guarino et al. 1989b Infect. Immun. 57:649) having the mature amino acid sequence Asn Thr Phe Tyr Cys Cys Glu Leu Cys Cys Asn Pro Ala Cys Ala Gly Cys Tyr (SEQ ID NO: 103); Y. enterocolitica ST peptides, Y-ST(Y-STa), Y-STb, and Y-STc (reviewed in Huang et al. 1997 Microb. Pathog. 22:89) having the following pro-form amino acid sequences: Gln Ala Cys Asp Pro Pro Ser Pro Pro Ala Glu Val Ser Ser Asp Trp Asp Cys Cys Asp Val Cys Cys Asn Pro Ala Cys Ala Gly Cys (SEQ ID NO:104) (as well as a Ser-7 to Leu-7 variant of Y-STa (SEQ ID NO:105), (Takao et al. 1985 Eur. J. Biochem. 152:199)); Lys Ala Cys Asp Thr Gln Thr Pro Ser Pro Ser Glu Glu Asn Asp Asp Trp Cys Cys Glu Val Cys Cys Asn Pro Ala Cys Ala Gly Cys (SEQ ID NO:106); Gln Glu Thr Ala Ser Gly Gln Val Gly Asp Val Ser Ser Ser Thr Ile Ala Thr Glu Val Ser Glu Ala Glu Cys Gly Thr Gln Ser Ala Thr Thr Gln Gly Glu Asn Asp Trp Asp Trp Cys Cys Glu Leu Cys Cys Asn Pro Ala Cys Phe Gly Cys (SEQ ID NO:107), respectively; Y. kristensenii ST peptide having the mature amino acid sequence Ser Asp Trp Cys Cys Glu Val Cys Cys Asn Pro Ala Cys Ala Gly Cys (SEQ ID NO:108); V. cholerae non-01 ST peptide (Takao et al. (1985) FEBS lett. 193:250) having the mature amino acid sequence Ile Asp Cys Cys Glu Ile Cys Cys Asn Pro Ala Cys Phe Gly Cys Leu Asn (SEQ ID NO:109); and V. mimicus ST peptide (Arita et al. 1991 FEMS Microbiol. Lett. 79:105) having the mature amino acid sequence Ile Asp Cys Cys Glu Ile Cys Cys Asn Pro Ala Cys Phe Gly Cys Leu Asn (SEQ ID NO:110). Table I below provides sequences of all or a portion of a number of mature ST peptides.

TABLE I

| | | |
|---|---|---|
| GenBank® | | |
| Accession | GenBank® | |
| No. | GI No. | Sequence |

| | | |
|---|---|---|
| QHECIB | 69638 | NSSNYCCELCCNPACTGCY |
| | | (SEQ ID NO:100) |
| P01559 | 123711 | NTFYCCELCCNPACAGCY |
| | | (SEQ ID NO:101) |
| AAA24653 | 147878 | NTFYCCELCCNPACAPCY |
| | | (SEQ ID NO:111) |
| P01560 | 123707 | NTFYCCELCCYPACAGCN |
| | | (SEQ ID NO:102) |
| AAA27561 | 295439 | IDCCEICCNPACFGCLN |
| | | (SEQ ID NO:109) |
| P04429 | 123712 | IDCCEICCNPACFGCLN |
| | | (SEQ ID NO:110) |
| S34671 | 421286 | IDCCEICCNPACF |
| | | (SEQ ID NO:112) |
| CAA52209 | 395161 | IDCCEICCNPACFG |
| | | (SEQ ID NO:113) |
| A54534 | 628844 | IDCCEICCNPACFGCLN |
| | | (SEQ ID NO:114) |
| AAL02159 | 15592919 | IDRCEICCNPACFGCLN |
| | | (SEQ ID NO:115) |
| AAA18472 | 487395 | DWDCCDVCCNPACAGC |
| | | (SEQ ID NO:116) |
| S25659 | 282047 | DWDCCDVCCNPACAGC |
| | | (SEQ ID NO:117) |
| P74977 | 3913874 | NDDWCCEVCCNPACAGC |
| | | (SEQ ID NO:118) |
| BAA23656 | 2662339 | WDWCCELCCNPACFGC |
| | | (SEQ ID NO:119) |
| P31518 | 399947 | SDWCCEVCCNPACAGC |
| | | (SEQ ID NO:108) |
| | | QACDPPSPPAEVSSDWDCCDVCCDPAC AGC |
| | | (SEQ ID NO:120) |
| | | QACDPPSPPAEVSSDWDCCDVCCNPACAG C |
| | | (SEQ ID NO:104) |
| | | KACDTQTPSPSEENDDTCCEVCCNPACAG C |
| | | (SEQ ID NO:106) |
| | | QETASGQVGDVSSSTIATEVSEAECGTQSAT |
| | | TQGENDWDWCCELCCNPACFGC |
| | | (SEQ ID NO:107) |
| P01559 | 123711 | MKKLMLAIFISVLSFPSFSQSTESLDS |
| | | SKEKITLETKKCDVVKNNSEKKSEN |
| | | MNNTFYCCELCCNPACAGCY |
| | | (SEQ ID NO:121) |
| P07965 | 3915589 | MKKSILFIFLSVLSFSPFAQDAKPVES |
| | | SKEKITLESKKCNIAKKSNKSGPESM |
| | | NSSNYCCELCCNPACTGCY |
| | | (SEQ ID NO:122) |
| S25659 | 282047 | MKKIVFVLVLMLSSFGAFGQETVSG |
| | | QFSDALSTPITAEVYKQACDPPLPPA |
| | | EVSSDWDCCDVCCNPACAGC |
| | | (SEQ ID NO:123) |

[0120] The immature (including pre and pro regions) form of E. coli ST-1A (ST-P) protein has the sequence: mkklmlaifisvlsfpsfsqstesldsskekitletkkcdvvknnsekksenmnntfyccelccnpacagcy (SEQ ID NO:121; see GenBank® Accession No. P01559 (gi:123711). The pre sequence extends from aa 1-19. The pro sequence extends from aa 20-54. The mature protein extends from 55-72. The immature (including pre and pro regions) form of E. coli ST-1B (ST-H) protein has the sequence: mkksilfiflsvlsfspfaqdakpvesskekitleskkcniakksnksgpesmnssnyccelccnpactgcy (SEQ ID NO:122; see GenBank® Accession No. P07965 (gi:3915589). The immature (including pre and pro regions) form of Y. enterocolitica ST protein has the sequence: mkkivfvlvlmlssfgafgqetvsgqfsdalstpitaevykqacdpplppaevssdwdccdvccnpacagc (SEQ ID NO:123; see GenBank® Accession No. S25659 (gi:282047).

[0121] The peptides of the invention, like the bacterial ST peptides, have six Cys residues. These six Cys residues form three disulfide bonds in the mature and active form of the peptide. If the six Cys residues are identified, from the amino to carboxy terminus of the peptide, as A, B, C, D, E, and F, then the disulfide bonds form as follows: A-D, B-E, and C-F. The formation of these bonds is thought to be important for GC-C receptor binding. Certain of the peptides of the invention include a potentially functional chymotrypsin cleavage site, e.g., a Trp, Tyr or Phe located between either Cys B and Cys D or between Cys E and Cys F. Cleavage at either chymotrypsin cleavage site reduces or eliminates the ability of the peptide to bind to the GC-C receptor.

[0122] In the human body an inactive form of chymotrypsin, chymotrypsinogen is produced in the pancreas. When this inactive enzyme reaches the small intestine it is converted to active chymotrypsin by the excision of two di-peptides. Active chymotrypsin can potentially cleave peptides at the peptide bond on the carboxy-terminal side of Trp, Tyr or Phe. The presence of active chymotrypsin in the intestinal tract can potentially lead to cleavage of certain of the peptides of the invention having an appropriately positioned functional chymotrypsin cleavage site. It is expected that chymotrypsin cleavage will moderate the action of a peptide of the invention having an appropriately positioned chymotrypsin cleavage site as the peptide passes through the intestinal tract.

[0123] Trypsinogen, like chymotrypsin, is a serine protease that is produced in the pancreas and is present in the digestive tract. The active form, trypsin, will cleave peptides having a Lys or Arg. The presence of active trypsin in the intestinal tract can lead to cleavage of certain of the peptides of the invention having an appropriately positioned functional trypsin cleavage site. It is expected that chymotrypsin cleavage will moderate the action of a peptide of the invention having an appropriately positioned trypsin cleavage site as the peptide passes through the intestinal tract.

[0124] Many gastrointestinal disorders, including IBS, are associated with abdominal or visceral pain. Certain of the peptides of the invention include analgesic or antinociceptive tags such as the carboxy-terminal sequence AspPhe immediately following a Trp, Tyr or Phe that creates a functional chymotrypsin cleavage site or following Lys or Arg that creates a functional trypsin cleavage site. Chymotrypsin in the intestinal tract can potentially cleave such peptides immediately carboxy terminal to the Trp, Phe or Tyr residue, releasing the dipeptide, AspPhe. This dipeptide has been shown to have analgesic activity in animal models (Abdikkahi et al. 2001 Fundam Clin Pharmacol 15:117-23; Nikfar et al 1997, 29:583-6; Edmundson et al 1998 Clin Pharmacol Ther 63:580-93). In this manner such peptides can treat both pain and inflammation. Other analgesic peptides can be present at the carboxy terminus of the peptide (following a functional cleavage site) including: endomorphin-1, endomorphin-2, nocistatin, dalargin, lupron, and substance P.

[0125] A number of the useful peptides are based on the core sequence: Cys Cys Glu Leu Cys Cys Asn Pro Ala Cys Thr Gly Cys Tyr (SEQ ID NO:6). To create a variant having a potentially functional chymotrypsin cleavage site capable of inactivating the peptide, either the Leu (underlined) or the Thr (underlined) can be replaced by Trp, Phe or Tyr or both the Leu and the Thr can be replaced by (independently) Trp, Phe or Tyr. To create a variant having an analgesic di-peptide, the core sequence is followed by Asp Phe. The carboxy terrninal Tyr in the core sequence can allow the Asp Phe dipeptide to be released by chymotrypsin in the digestive tract. The core sequence can be optionally be preceded by Asn Ser Ser Asn Tyr or Asn.

[0126] Thus, useful variants based on the core sequence include:

(SEQ ID NO:4)

Asn Ser Ser Asn Tyr Cys Cys Glu Leu Cys Cys Asn
Pro Ala Cys Thr Gly Cys Tyr

(SEQ ID NO:7)

Asn Ser Ser Asn Tyr Cys Cys Glu Leu Cys Cys Asn
Pro Ala Cys Trp Gly Cys Tyr

(SEQ ID NO:5)

Asn Ser Ser Asn Tyr Cys Cys Glu Tyr Cys Cys Asn
Pro Ala Cys Thr Gly Cys Tyr

(SEQ ID NO:6)

Cys Cys Glu Leu Cys Cys Asn Pro Ala Cys Thr Gly
Cys Tyr

(SEQ ID NO:8)

Cys Cys Glu Leu Cys Cys Asn Pro Ala Cys Trp Gly
Cys Tyr

(SEQ ID NO:3SEQ ID NO:3)

Cys Cys Glu Tyr Cys Cys Asn Pro Ala Cys Thr Gly
Cys Tyr

(SEQ ID NO:9)

Asn Cys Cys Glu Leu Cys Cys Asn Pro Ala Cys Thr
Gly Cys Tyr

(SEQ ID NO:10)

Asn Cys Cys Glu Leu Cys Cys Asn Pro Ala Cys Trp
Gly Cys Tyr

(SEQ ID NO:11)

Asn Cys Cys Glu Phe Cys Cys Asn Pro Ala Cys Thr
Gly Cys Tyr

(SEQ ID NO:12)

Asn Cys Cys Glu Tyr Cys Cys Asn Pro Ala Cys Thr
Gly Cys Tyr

(SEQ ID NO:13)

Asn Cys Cys Glu Trp Cys Cys Asn Pro Ala Cys Thr
Gly Cys Tyr

(SEQ ID NO:14)

Asn Cys Cys Glu Arg Cys Cys Asn Pro Ala Cys Thr
Gly Cys Tyr

(SEQ ID NO:15)

Asn Cys Cys Glu Lys Cys Cys Asn Pro Ala Cys Thr
Gly Cys Tyr

(SEQ ID NO:16)

Asn Ser Ser Asn Tyr Cys Cys Glu Leu Cys Cys Asn
Pro Ala Cys Thr Gly Cys Tyr Asp Phe

(SEQ ID NO:17)

Asn Ser Ser Asn Tyr Cys Cys Glu Leu Cys Cys Asn
Pro Ala Cys Trp Gly Cys Tyr Asp Phe

(SEQ ID NO:18)

Asn Ser Ser Asn Tyr Cys Cys Glu Phe Cys Cys Asn
Pro Ala Cys Thr Gly Cys Tyr Asp Phe

(SEQ ID NO:19)

Asn Ser Ser Asn Tyr Cys Cys Glu Tyr Cys Cys Asn
Pro Ala Cys Thr Gly Cys Tyr Asp Phe

(SEQ ID NO:20)

Asn Ser Ser Asn Tyr Cys Cys Glu Trp Cys Cys Asn
Pro Ala Cys Thr Gly Cys Tyr Asp Phe

(SEQ ID NO:21)

Asn Ser Ser Asn Tyr Cys Cys Glu Arg Cys Cys Asn
Pro Ala Cys Thr Gly Cys Tyr Asp Phe

(SEQ ID NO:22)

Asn Ser Ser Asn Tyr Cys Cys Glu Lys Cys Cys Asn
Pro Ala Cys Thr Gly Cys Tyr Asp Phe

(SEQ ID NO:23)

Cys Cys Glu Leu Cys Cys Asn Pro Ala Cys Thr Gly
Cys Tyr Asp Phe

(SEQ ID NO:24)

Cys Cys Glu Leu Cys Cys Asn Pro Ala Cys Trp Gly
Cys Tyr Asp Phe

(SEQ ID NO:25)

Cys Cys Glu Phe Cys Cys Asn Pro Ala Cys Thr Gly
Cys Tyr Asp Phe

(SEQ ID NO:26)

Cys Cys Glu Tyr Cys Cys Asn Pro Ala Cys Thr Gly
Cys Tyr Asp Phe

(SEQ ID NO:27)

Cys Cys Glu Trp Cys Cys Asn Pro Ala Cys Thr Gly
Cys Tyr Asp Phe

(SEQ ID NO:28)

Cys Cys Glu Arg Cys Cys Asn Pro Ala Cys Thr Gly
Cys Tyr Asp Phe

(SEQ ID NO:29)

Cys Cys Glu Lys Cys Cys Asn Pro Ala Cys Thr Gly
Cys Tyr Asp Phe

(SEQ ID NO:30)

Asn Cys Cys Glu Leu Cys Cys Asn Pro Ala Cys Thr
Gly Cys Tyr Asp Phe

(SEQ ID NO:31)

Asn Cys Cys Glu Leu Cys Cys Asn Pro Ala Cys Trp
Gly Cys Tyr Asp Phe

(SEQ ID NO:32)

Asn Cys Cys Glu Phe Cys Cys Asn Pro Ala Cys Thr
Gly Cys Tyr Asp Phe

(SEQ ID NO:33)

Asn Cys Cys Glu Tyr Cys Cys Asn Pro Ala Cys Thr
Gly Cys Tyr Asp Phe

(SEQ ID NO:34)

Asn Cys Cys Glu Trp Cys Cys Asn Pro Ala Cys Thr
Gly Cys Tyr Asp Phe

(SEQ ID NO:35)

Asn Cys Cys Glu Arg Cys Cys Asn Pro Ala Cys Thr
Gly Cys Tyr Asp Phe

(SEQ ID NO:36)

Asn Cys Cys Glu Lys Cys Cys Asn Pro Ala Cys Thr
Gly Cys Tyr Asp Phe

[0127] In some cases, the peptides of the invention are produced as a prepro protein that includes the amino terminal leader sequence: mkksilfiflsvlsfspfaqdakpvesskekitleskkcniakksnksgpesmn. Where the peptide is produced by a bacterial cell, e.g., E. coli, the forgoing leader sequence will be cleaved and the mature peptide will be efficiently secreted from the bacterial cell. U.S. Pat. No. 5,395,490 describes vectors, expression systems and methods for the efficient production of ST peptides in bacterial cells and methods for achieving efficient secretion of mature ST peptides. The vectors, expression systems and methods described in U.S. Pat. No. 5,395,490 can be used to produce the ST peptides and variant ST peptides of the present invention

Variant Peptides

[0128] The invention includes variant peptides which can include one, two, three, four, five, six, seven, eight, nine, or ten (in some embodiments fewer than 5 or fewer than 3 or 2 or fewer) amino acid substitutions and/or deletions compared to SEQ ID NOs:6 to 99. The substitution(s) can be conservative or non-conservative. The naturally-occurring amino acids can be substituted by D-isomers of any amino acid, non-natural amino acids, and other groups. A conservative amino acid substitution results in the alteration of an amino acid for a similar acting amino acid, or amino acid of like charge, polarity, or hydrophobicity. At some positions, even conservative amino acid substitutions can reduce the activity of the peptide. A conservative substitution can substitute a naturally-occurring amino acid for a non-naturally-occurring amino acid. The amino acid substitutions among naturally-occurring amino acids are listed in Table II

TABLE II

| | | |
|---|---|---|
| For Amino Acid | Code | Replace with anv of |

| | | |
|---|---|---|
| Alanine | Ala | Gly, Cys, Ser |
| Arginine | Arg | Lys, His |
| Asparagine | Asn | Asp, Glu, Gln, |
| Aspartic Acid | Asp | Asn, Glu, Gln |
| Cysteine | Cys | Met, Thr, Ser |
| Glutamine | Gln | Asn, Glu, Asp |
| Glutamic Acid | Glu | Asp, Asn, Gln |
| Glycine | Gly | Ala |
| Histidine | His | Lys, Arg |
| Isoleucine | Ile | Val, Leu, Met |
| Leucine | Leu | Val, Ile, Met |
| Lysine | Lys | Arg, His |
| Methionine | Met | Ile, Leu, Val |
| Phenylalanine | Phe | Tyr, His, Trp |
| Proline | Pro | |
| Serine | Ser | Thr, Cys, Ala |
| Threonine | Thr | Ser, Met, Val |
| Tryptophan | Trp | Phe, Tyr |
| Tyrosine | Tyr | Phe, His |
| Valine | Val | Leu, Ile, Met |

[0129] In some circumstances it can be desirable to treat patients with a variant peptide that binds to and activates intestinal GC-C receptor, but is less active than the non-variant form the peptide. This reduced activity can arise from reduced affinity for the receptor or a reduced ability to activate the receptor once bound or reduced stability of the peptide. In some peptides pairs of Cys residues which normally form a disulfide bond one or both members of the pair can be replaced by homocysteine, 3-mercaptoproline (Kolodziej et al. 1996 Int J Pept Protein Res 48:274);β, β dimethylcysteine (Hunt et al. 1993 Int J Pept Protein Res 42:249) or diaminopropionic acid (Smith et al. 1978 J Med Chem 21:117) to form alternative internal cross-links at the positions of the normal disulfide bonds.

Production of Peptides

[0130] Useful peptides can be produced either in bacteria including, without limitation, E. coli, or in other existing systems for peptide or protein production (e.g., Bacillus subtilis, baculovirus expression systems using Drosophila Sf9 cells, yeast or filamentous fungal expression systems, mammalian cell expression systems), or they can be chemically synthesized.

[0131] If the peptide or variant peptide is to be produced in bacteria, e.g., E. coli, the nucleic acid molecule encoding the peptide will preferably also encode a leader sequence that permits the secretion of the mature peptide from the cell. Thus, the sequence encoding the peptide can include the pre sequence and the pro sequence of, for example, a naturally-occurring bacterial ST peptide. The secreted, mature peptide can be purified from the culture medium.

[0132] The sequence encoding a peptide of the invention is preferably inserted into a vector capable of delivering and maintaining the nucleic acid molecule in a bacterial cell. The DNA molecule may be inserted into an autonomously replicating vector (suitable vectors include, for example, pGEM3Z and pcDNA3, and derivatives thereof). The vector nucleic acid may be a bacterial or bacteriophage DNA such as bacteriophage lambda or M13 and derivatives thereof. Construction of a vector containing a nucleic acid described herein can be followed by transformation of a host cell such as a bacterium. Suitable bacterial hosts include but are not limited to, E. coli, B. subtilis, Pseudomonas, Salmonella. The genetic construct also includes, in addition to the encoding nucleic acid molecule, elements that allow expression, such as a promoter and regulatory sequences. The expression vectors may contain transcriptional control sequences that control transcriptional initiation, such as promoter, enhancer, operator, and repressor sequences. A variety of transcriptional control sequences are well known to those in the art. The expression vector can also include a translation regulatory sequence (e.g., an untranslated 5′ sequence, an untranslated 3′ sequence, or an internal ribosome entry site). The vector can be capable of autonomous replication or it can integrate into host DNA to ensure stability during peptide production.

[0133] The protein coding sequence that includes a peptide of the invention can also be fused to a nucleic acid encoding a polypeptide affinity tag, e.g., glutathione S-transferase (GST), maltose E binding protein, protein A, FLAG tag, hexa-histidine, myc tag or the influenza HA tag, in order to facilitate purification. The affinity tag or reporter fusion joins the reading frame of the peptide of interest to the reading frame of the gene encoding the affinity tag such that a translational fusion is generated. Expression of the fusion gene results in translation of a single polypeptide that includes both the peptide of interest and the affinity tag. In some instances where affinity tags are utilized, DNA sequence encoding a protease recognition site will be fused between the reading frames for the affinity tag and the peptide of interest.

[0134] Genetic constructs and methods suitable for production of immature and mature forms of the peptides and variants of the invention in protein expression systems other than bacteria, and well known to those skilled in the art, can also be used to produce peptides in a biological system.

[0135] Mature peptides and variants thereof can be synthesized by the solid-phase method using an automated peptide synthesizer. For example, the peptide can be synthesized on Cyc(4-CH₂Bxl)-OCH₂-4-(oxymethyl)-phenylacetamidomethyl resin using a double coupling program. Protecting groups must be used appropriately to create the correct disulfide bond pattern. For example, the following protecting groups can be used: t-butyloxycarbonyl (alpha-amino groups); acetamidomethyl (thiol groups of Cys residues B and E); 4-methylbenyl (thiol groups of Cys residues C and F); benzyl (y-carboxyl of glutamic acid and the hydroxyl group of threonine, if present); and bromobenzyl (phenolic group of tyrosine, if present). Coupling is effected with symmetrical anhydride of t-butoxylcarbonylamino acids or hydroxybenzotriazole ester (for asparagine or glutamine residues), and the peptide is deprotected and cleaved from the solid support in hydrogen fluoride, dimethyl sulfide, anisole, and p-thiocresol using 8/1/1/0.5 ratio (v/v/v/w) at 0° C. for 60 min. After removal of hydrogen fluoride and dimethyl sulfide by reduced pressure and anisole and p-thiocresol by extraction with ethyl ether and ethyl acetate sequentially, crude peptides are extracted with a mixture of 0.5M sodium phosphate buffer, pH 8.0 and N, N-dimethylformamide using 1/1 ratio, v/v. The disulfide bond for Cys residues B and E is the formed using dimethyl sulfoxide (Tam et al. (1991) J. Am. Chem. Soc. 113:6657-62). The resulting peptide is the purified by reverse-phase chromatography. The disulfide bond between Cys residues C and F is formed by first dissolving the peptide in 50% acetic acid in water. Saturated iodine solution in glacial acetic acid is added (1 ml iodine solution per 100 ml solution). After incubation at room temperature for 2 days in an enclosed glass container, the solution is diluted five-fold with deionized water and extracted with ethyl ether four times for removal of unreacted iodine. After removal of the residual amount of ethyl ether by rotary evaporation the solution of crude product is lyophilized and purified by successive reverse-phase chromatography.

Intestinal GC-C Receptor Binding Assay

[0136] The ability of peptides and other agents to bind to the intestinal GC-C receptor can be tested as follows. Cells of the T84 human colon carcinoma cell line (American Type Culture Collection (Bethesda, Md.) are grown to confluence in 24-well culture plates with a 1:1 mixture of Ham's F12 medium and Dulbecco's modified Eagle's medium (DMEM), supplemented with 5% fetal calf serum. Cells used in the assay are typically between passages 54-60. Briefly, T84 cell monolayers in 24-well plates are washed twice with 1 ml of binding buffer (DMEM containing 0.05% bovine serum albumin and 25 mM HEPES, pH 7.2), then incubated for 30 min at 37° C. in the presence of mature radioactively labeled E. coli ST peptide and the test material at various concentrations. The cells are then washed four times with 1 ml of DMEM and solubilized with 0.5 ml/well 1N NaOH. The level of radioactivity in the solubilized material is then determined using standard methods.

### EXAMPLE 1

### Preparation of Variant ST Peptides and Wild-type ST Peptide

[0137] 1a: Preparation of Recombinant Variant ST Peptides and Wild-type ST Peptide

[0138] A variant ST peptide having the sequence Asn Ser Ser Asn Tyr Cys Cys Glu Tyr Cys Cys Asn Pro Ala Cys Thr Gly Cys Tyr (SEQ ID NO:5) was produced recombinantly and tested in an animal model. A peptide having the sequence of the wild-type ST peptide was also created (SEQ ID NO:4).

[0139] SEQ ID NO:5 and SEQ ID NO:4 peptides were produced as preproproteins using vectors produced as follows. A sequence encoding a heat-stable enterotoxin pre-pro sequence was amplified from pGK51/pGSK51 (ATCC 67728) using oligonucleotide MO3514 (540 CACACCATATGAAGAAATCAATATTATTTATTTTTCTTTCTG 3′ (SEG ID NO:1655)) and oligonucelotide MO3515 (5′ CACACCTCGAGTTAGGTCTCCATGCTTTCAGGACCACTTTTATTAC 3′ (SEQ ID NO: 1656)). The amplification product fragment was digested with NdeI/XhoI and ligated to the T7 expression vector, pET26b(+) (Novagen) digested with NdeI/XhoI thereby creating plasmid MB3976. The region encoding the pre-pro protein was sequenced and found to encode the amino acid sequence: mkksilfiflsvlsfspfaqdakpagsskekitleskkcnivkksnksgpesm (SEQ ID NO:124) which differs from the amino acid sequence of heat-stable enterotoxin a2 precursor (sta2; mkksilfiflsvlsfspfaqdakpagsskekitleskkcnivkknnesspesm (SEQ ID NO: 125); GenBank® Accession No. Q47185, GI: 3913876) at three positions (indicated by underlining and bold text) near the C-terminus. To create expression vectors with the pre-pro sequence, complementary oligos encoding each ST peptide variant or wild-type ST peptide were annealed and cloned into the MB3976 expression vector. To create MB3984 (encoding SEQ ID NO:4 peptide (wild-type ST peptide) as a prepro protein), containing the amino acid sequence, NSSNYCCELCCNPACTGCY (SEQ ID NO:4) fused downstream of the pre-pro sequence, MB 3976 was digested with BsaI/XhoI and ligated to annealed oligos M03621 (5′ GCATGAATAGTAGCAATTACTGCTGTGAATTGTGTTGTAATCCTGCTTGTACCGGGT GCTATTAATAAC 3′ (SEQ ID NO: 1657)) and MO3622 (5′ TCGAGTTATTAATAGCACCCGGTACAAGCAGGATTACAACACAATTCACAGCAGTA ATTGCTACTATTC 3′ (SEQ ID NO:1658)). To create MB3985 (encoding SEQ ID NO:5 as a prepro protein) containing the following amino acid sequence, NSSNYCCEYCCNPACTGCY fused downstream of the pre-pro sequence, MB 3976 was digested with BsaI/XhoI and ligated to annealed oligos M03529 (5′ GCATGAATAGTAGCAATTACTGCTGTGAATATTGTTGTAATCCTGCTTGTACCGGGT GCTATTAATAAC 3′ (SEQ ID NO:1659)) and MO3530 (5′ TCGAGTTATTAATAGCACCCGGTACAAGCAGGATTACAACAATATTCACAGCAGTA ATTGCTACTATTC 3′(SEQ ID NO:1660)).

[0140] The SEQ ID NO:5 peptide and the SEQ ID NO:4 peptide were produced as follows. The expression vectors were transformed into E. coli bacterial host BL21 λ DE3 (Invitrogen). A single colony was innoculated and grown shaking overnight at 30° C. in L broth +25 mg/l kanamycin. The overnight culture was added to 3.2 L of batch medium (Glucose 25 g/l, Caseamino Acids 5 g/l, Yeast Extract 5 g/l, KH₂PO₄ 13.3 g/l, (NH₄)₂HPO₄ 4 g/l, MgSO₄-7H₂O 1.2 g/l, Citric Acid 1.7 g/l, EDTA 8.4 mg/l, CoCl₂-6H₂O 2.5 mg/l, MnCl₂-4H₂O 15 mg/l, CuCl₂-4H₂O 1.5 mg/l, H₃BO₃ 3 mg/l, Na₂MoO₄-2H₂O 2.5 mg/l, Zn Acetate-2H₂O 13 mg/l, Ferric Citrate 100 mg/l, Kanamycin 25 mg/l, Antifoam DF₂O₄ 1 ml/l) and fermented using the following process parameters : pH 6.7—control with base only (28% NH₄OH), 30° C., aeration: 5 liters per minute. After the initial consumption of batch glucose (based on monitoring dissolved oxygen (DO) levels), 1.5 L of feed medium (Glucose 700 g/l, Caseamino Acids 10 g/l, Yeast Extract 10 g/l, MgSO₄-7H₂O 4 g/l, EDTA 13 mg/l, CoCl₂-6H₂O 4 mg/l, MnCl₂-4H₂O 23.5 mg/l, CuCl₂-4H₂O 2.5 mg/l, H₃BO₃ 5 mg/l Na₂MoO₄-2H₂O 4 mg/l, Zn Acetate-2H₂O 16 mg/l, Ferric Citrate 40 mg/l, Antifoam DF₂O₄ 1 ml/l) was added at a feed rate controlled to maintain 20% DO. IPTG was added to 0.2 mM 2 hours post feed start. The total run time was approximately 40-45 hours (until feed exhaustion).

[0141] Cells were collected by centrifugation at 5,000 g for 10 minutes. The cell pellet was discarded and the supernatant was passed through a 50 Kd ultrafiltration unit. The 50 Kd filtrate (0.6 liters) was loaded onto a 110 ml Q-Sepharose fast Flow column (Amersham Pharmacia, equilibrated with 20 mM Tris-HCl pH 7.5) at a flow rate of 400 ml/hour. The column was washed with six volumes of 20 mM Tris-HCl pH 7.5 and proteins were eluted with 50 mM acetic acid collecting 50 ml fractions. Fractions containing ST peptide variant or wild-type ST peptide were pooled and the solvent was removed by rotary evaporation. The dried proteins were resuspended in 10 ml of 8% acetic acid, 0.1% trifluoroacetic acid (TFA) and loaded onto a Varian Polaris C18-A column (250×21.2 mm 10 μm, equilibrated in the same buffer) at a flow rate of 20 ml/min. The column was washed with 100 ml of 8% methanol, 0.1% TFA and developed with a gradient (300 ml) of 24 to 48% methanol, 0.1% TFA, collecting 5-ml fractions. Fractions containing peptide were pooled and the solvent was removed by rotary evaporation. The peptides were dissolved in 0.1% TFA and lyophilized.

[0142] The SEQ ID NO:5 peptide and SEQ ID NO:4 peptide fractions were analyzed by standard LCMS and HPLC. LCMS analysis revealed that SEQ ID NO:5 peptide is more homogeneous than SEQ ID NO: 4 peptide (see FIG. 1a; note that SEQ ID NO:5 peptide exhibits fewer peaks (Panel B) than SEQ ID NO:4 peptide (Panel A)).

[0143] 1b: Preparation of Synthetic Variant ST Peptides and Wild-type ST Peptide

[0144] Peptides were chemically synthesized by a commercial peptide synthesis company. Varying yields of peptides were obtained depending on the efficiency of chemical synthesis. Thus, the four peptides, in decreasing order of yield were: Cys Cys Glu Tyr Cys Cys Asn Pro Ala Cys Thr Gly Cys Tyr (SEQ ID NO:3),10-20% yield; Cys Cys Glu Leu Cys Cys Asn Pro Ala Cys Thr Gly Cys Tyr (SEQ ID NO:6); Asn Ser Ser Asn Tyr Cys Cys Glu Tyr Cys Cys Asn Pro Ala Cys Thr Gly Cys Tyr (SEQ ID NO:5); Asn Ser Ser Asn Tyr Cys Cys Glu Leu Cys Cys Asn Pro Ala Cys Thr Gly Cys Tyr (SEQ ID NO:SEQ ID NO:4), <5% yield. Thus the specific amino acid changes introduced into the peptides can create improved manufacturing properties.

[0145] FIG. 1b shows the total ion chromatograph profile of synthetically manufactured SEQ ID NO:3 peptide. FIG. 1c shows the total ion chromatograph profile of the control blank sample. There is one major peak present in the SEQ ID NO:3 peptide sample that is not also present in the control sample. Quantitative analysis suggests the SEQ ID NO:3 peptide is >98% pure.

### EXAMPLE 2

### Activation of the Intestinal GC-C Receptor by a Variant ST Peptide and ST Peptide

[0146] The ability of SEQ ID NO:5, SEQ ID NO:4, and SEQ ID NO:3 to activate the intestinal GC-C receptor was assessed in an assay employing the T84 human colon carcinoma cell line (American Type Culture Collection (Bethesda, Md.). For the assays cells were grown to confluency in 24-well culture plates with a 1:1 mixture of Ham's F12 medium and Dulbecco's modified Eagle's medium (DMEM), supplemented with 5% fetal calf serum and were used at between passages 54 and 60.

[0147] Briefly, monolayers of T84 cells in 24-well plates were washed twice with 1 ml/well DMEM, then incubated at 37° C. for 10 min with 0.45 ml DMEM containing 1 mM isobutylmethylxanthine (IBMX), a cyclic nucleotide phosphodiesterase inhibitor. Test peptides (50 μl) were then added and incubated for 30 minutes at 37° C. The media was aspirated and the reaction was then terminated by the addition of ice cold 0.5 ml of 0.1N HCl. The samples were held on ice for 20 minutes and then evaporated to dryness using a heat gun or vacuum centrifugation. The dried samples were resuspended in 0.5 ml of phosphate buffer provided in the Cayman Chemical Cyclic GMP EIA kit (Cayman Chemical, Ann Arbor, Mich.). Cyclic GMP was measured by EIA according to procedures outlined in the Cayman Chemical Cyclic GMP EIA kit.

[0148] FIG. 2 shows the activity of chemically synthesized peptide variants in this GC-C receptor activity assay. In this assay, SEQ ID NO:4 and two different SEQ ID NO:3 peptides (SEQ ID NO:3(a) and SEQ ID NO:3(b), synthesized by two different methods) had activity comparable to SEQ ID NO:4. SEQ ID NO:5 and SEQ ID NO:4 peptide were chemically synthesized in a manner identical to that of SEQ ID NO:3(b).

### EXAMPLE 3

### SEQ ID NO:5 and SEQ ID NO:4 Increase Intestinal Transit in Mice

[0149] In order to determine whether the peptides increase the rate of gastrointestinal transit, the peptides and controls were tested using a murine gastrointestinal transit (GIT) assay (Moon et al. Infection and Immunity 25:127, 1979). In this assay, charcoal, which can be readily visualized in the gastrointestinal tract is administered to mice after the administration of a test compound. The distance traveled by the charcoal is measured and expressed as a percentage of the total length of the colon.

[0150] Mice were fasted with free access to water for 12 to 16 hours before the treatment with peptide or control buffer. The peptides were orally administered at 1 μg/kg-1 mg/kg of peptide in buffer (20 mM Tris pH 7.5) 7 minutes before being given an oral dose of 5% Activated Carbon (Aldrich 242276-250G). Control mice were administered buffer only before being given a dose of Activated Carbon. After 15 minutes, the mice were sacrificed and their intestines from the stomach to the cecum were dissected. The total length of the intestine as well as the distance traveled from the stomach to the charcoal front was measured for each animal and the results are expressed as the percent of the total length of the intestine traveled by the charcoal front. All results are reported as the average of 10 mice±standard deviation. A comparison of the distance traveled by the charcoal between the mice treated with peptide versus the mice treated with vehicle alone was performed using a Student's t test and a statistically significant difference was considered for P<0.05. P-values are calculated using a two-sided T-Test assuming unequal variances.

[0151] As can be seen in FIG. 3a and FIG. 3b, wild-type ST peptide (SEQ ID NO:4, (Sigma-Aldrich, St Louis, Mo.; 0.1 mg/kg), synthetically manufactured SEQ ID NO:3 and Zelnorm® (0.1 mg/kg), a drug approved for IBS that is an agonist for the serotonin receptor 5HT4, increase gastrointestinal transit rate in this model. FIG. 4a shows the result of a study demonstrating that intestinal transit rate increases with an increasing dosage of either recombinantly synthesized SEQ ID NO:4 or SEQ ID NO:5. FIG. 4b shows the results of a study demonstrating both chemically synthesized SEQ ID NO:4 or SEQ ID NO:3 peptide increase intestinal transit rates more than either Tris buffer alone or an equivalent dose of Zelnorm®.

[0152] The identical experiment was performed to determine if SEQ ID NO:3 is effective in a chronic dosing treatment regimen. Briefly, 8 week old CD1 female mice are dosed orally once a day for 5 days with either SEQ ID NO:3 (0.06 mg/kg or 0.25 mg/kg in 20 mM Tris pH 7.5) or vehicle alone (20 mM Tris pH 7.5). On the 5^{th} day, a GIT assay is performed identical to that above except 200 μl of a 10% charcoal solution is administered. FIG. 4c shows the result s of a study demonstrating both chemically synthesized SEQ ID NO:3 or Zelnorm® are effective in a mouse gastrointestinal motility assay upon chronic dosing (daily for 5 days). The results are shown side by side with acute dosing (1 day).

### EXAMPLE 4

### SEQ ID NO:5 Peptide and SEQ ID NO:4 Peptide Increase Intestinal Secretion in Suckling Mice (SuMi Assay)

[0153] SEQ ID NO:4 peptide and SEQ ID NO:5 were tested for their ability to increase intestinal secretion using a suckling mouse model of intestinal secretion. In this model a test compound is administered to suckling mice that are between 7 and 9 days old. After the mice are sacrificed, the gastrointestinal tract from the stomach to the cecum is dissected (“guts”). The remains (“carcass”) as well as the guts are weighed and the ratio of guts to carcass weight is calculated. If the ratio is above 0.09, one can conclude that the test compound increases intestinal secretion. FIG. 5a shows a dose response curve for wild-type ST peptide (SEQ ID NO:4) in this model. FIG. 5b shows dose response curve for the SEQ ID NO:3 peptide in this model. These data show that wild-type ST peptide (purchased from TDT, Inc. West Chester, Pa.) and the SEQ ID NO:3 peptide increase intestinal secretion. The effect of Zelnorm® was also studied. As can be seen from FIG. 5, Zelnorm® at 0.2 mg/kg does not increase intestinal secretion in this model. FIG. 6a shows a dose response curve for the recombinant SEQ ID NO:4 peptide described above and the recombinant SEQ ID NO:5 peptide described above. As can be seen from FIG. 6a, both peptides increase intestinal secretion in this model. Similarly FIG. 6b shows a dose response curve for chemically synthesized SEQ ID NO:5, SEQ ID NO:3 and SEQ ID NO:4 as well as wild-type ST peptide (purchased from Sigma-Aldrich, St Louis, Mo.).

Colonic Hyperalgesia Animal Models

[0154] Hypersensitivity to colorectal distension is common in patients with IBS and may be responsible for the major symptom of pain. Both inflammatory and non-inflammatory animal models of visceral hyperalgesia to distension have been developed to investigate the effect of compounds on visceral pain in IBS.

[0155] I. Trinitrobenzenesulphonic Acid (TNBS)-induced Rectal Allodynia Model

[0156] Male Wistar rats (220-250 g) were premedicated with 0.5 mg/kg of acepromazine injected intraperitoneally (IP) and anesthetized by intramuscular administration of 100 mg/kg of ketamine. Pairs of nichrome wire electrodes (60 cm in length and 80 μm in diameter) were implanted in the striated muscle of the abdomen, 2 cm laterally from the white line. The free ends of electrodes were exteriorized on the back of the neck and protected by a plastic tube attached to the skin. Electromyographic (EMG) recordings were started 5 days after surgery. Electrical activity of abdominal striated muscle was recorded with an electroencephalograph machine (Mini VIII, Alvar, Paris, France) using a short time constant (0.03 sec.) to remove low-frequency signals (<3 Hz).

[0157] Ten days post surgical implantation, trinitrobenzenesulphonic acid (TNBS) was administered to induce rectal inflammation. TNBS (80 mg kg⁻¹ in 0.3 ml 50% ethanol) was administered intrarectally through a silicone rubber catheter introduced at 3 cm from the anus under light diethyl-ether anesthesia, as described (Morteau et al. 1994 Dig Dis Sci 39:1239). Following TNBS administration, rats were placed in plastic tunnels where they were severely limited in mobility for several days before colorectal distension (CRD). Experimental compound was administered one hour before CRD which was performed by insertion into the rectum, at 1 cm of the anus, a 4 cm long balloon made from a latex condom (Gue et al, 1997 Neurogastroenterol. Motil. 9:271). The balloon was fixed on a rigid catheter taken from an embolectomy probe (Fogarty). The catheter attached balloon was fixed at the base of the tail. The balloon, connected to a barostat, was inflated progressively by step of 15 mmHg, from 0 to 60 mmHg, each step of inflation lasting 5 min. Evaluation of rectal sensitivity, as measured by EMG, was performed before (1-2 days) and 3 days following rectal instillation of TNBS.

[0158] The number of spike bursts that corresponds to abdominal contractions was determined per 5 min periods. Statistical analysis of the number of abdominal contractions and evaluation of the dose-effects relationships was performed by a one way analysis of variance (ANOVA) followed by a post-hoc (Student or Dunnett tests) and regression analysis for ED50 if appropriate.

[0159] FIG. 7 shows the results of experiment in which SEQ ID NO:3 activity was analyzed in the TNBS colorectal model. Significant decreases in abdominal response are observed at 0.3 μg/kg and 3 μg/kg SEQ ID NO:3. These results demonstrate that SEQ ID NO:3 reduces pain associated with colorectal distension in this animal model.

[0160] II. Stress-induced Hyperalgesia Model

[0161] Male Wistar Rats (200-250 g) are surgically implanted with nichrome wire electrodes as in the TNBS model. Ten days post surgical implantation, partial restraint stress (PRS), is performed as described by Williams et al. for two hours (Williams et al. 1988 Gastroenterology 64:611). Briefly, under light anesthesia with ethyl-ether, the foreshoulders, upper forelimbs and thoracic trunk are wrapped in a confining harness of paper tape to restrict, but not prevent body movements. Control sham-stress animals are anaesthetized but not wrapped. Thirty minutes before the end of the PRS session, the animals are administered test-compound or vehicle. Thirty minutes to one hour after PRS completion, the CRD distension procedure is performed as described above for the TNBS model with barostat at pressures of 15, 30, 45 and 60mm Hg. Statistical analysis on the number of bursts is determined and analyzed as in the TNBS model above.

Phenylbenzoquinone-induced Writhing Model

[0162] The PBQ-induced writhing model can be used to assess pain control activity of the peptides and GC-C receptor agonists of the invention. This model is described by Siegmund et al. (1957 Proc. Soc. Exp. Bio. Med. 95:729-731). Briefly, one hour after oral dosing with a test compound, e.g., a peptide, morphine or vehicle, 0.02% phenylbenzoquinone (PBQ) solution (12.5 mL/kg) is injected by intraperitoneal route into the mouse. The number of stretches and writhings are recorded from the 5^{th} to the 10^{th} minute after PBQ injection, and can also be counted between the 35^{th} and 40^{th} minute and between the 60^{th} and 65^{th} minute to provide a kinetic assessment. The results are expressed as the number of stretches and writhings (mean±SEM) and the percentage of variation of the nociceptive threshold calculated from the mean value of the vehicle-treated group. The statistical significance of any differences between the treated groups and the control group is determined by a Dunnett's test using the residual variance after a one-way analysis of variance (P<0.05) using SigmaStat Software.

[0163] FIGS. 8a and 8b show the effect of different doses of SEQ ID NO:5 and SEQ ID NO:3 in the PBQ writhing assay. Indomethacin, an NSAID (nonsteroidal anti-inflammatory drug) with known pain control activity, was used as the positive control in the assay. Significant reductions in writhings were observed for SEQ ID NO:5 (1 mg/kg dose) and SEQ ID NO:3 (2.5 mg/kg dose) compared to the vehicle control. Loss of efficacy at the highest dose tested has also been observed for multiple other compounds (such as 5HT-3 antagonists) tested in similar assays. The results of this study suggest that both SEQ ID NO:5 and SEQ ID NO:3 have antinociceptive effects in this visceral pain model comparable to the intermediate doses of indomethacin.

### EXAMPLE 5

### SEQ ID NO:3 Kd Determination

[0164] To determine the affinity of SEQ ID NO:3 for GC-C receptors found in rat intestinal mucosa, a competition binding assay was performed using rate intestinal epithelial cells. Epithelial cells from the small intestine of rats were obtained as described by Kessler et al. (J. Biol. Chem. 245: 5281-5288 (1970)). Briefly, animals were sacrificed and their abdominal cavities exposed. The small intestine was rinsed with 300 ml ice cold saline or PBS. 10 cm of the small intestine measured at 10 cm from the pylorus was removed and cut into 1 inch segments. Intestinal mucosa was extruded from the intestine by gentle pressure between a piece of parafilm and a P-1000 pipette tip. Intestinal epithelial cells were placed in 2 ml PBS and pipetted up and down with a 5 ml pipette to make a suspension of cells. Protein concentration in the suspension was measured using the Bradford method (Anal. Biochem. 72: 248-254 (1976)).

[0165] A competition binding assay was performed based on the method of Giannella et al. (Am. J. Physiol. 245: G492-G498) between [¹²⁵I] labeled SEQ ID NO:4 and SEQ ID NO:3. The assay mixture contained: 0.5 ml of DME with 20 mM HEPES-KOH pH 7.0, 0.9 mg of the cell suspension listed above, 21.4 fmol [¹²⁵I]-SEQ ID NO:4 (42.8 pM), and different concentrations of competitor SEQ ID NO:3 (0.01 to 1000 nM). The mixture was incubated at room temperature for 1 hour, and the reaction stopped by applying the mixture to GF/B glass-fiber filters (Whatman). The filters were washed with 5 ml ice-cold PBS and radioactivity was measured. FIG. 9 shows that the Kd for SEQ ID NO:3 in this assay is 4.5 nm. % B/Bo is the percentage of the ratio of radioactivity trapped in each sample (B) compared to the radioactivity retained in a control sample with no cold competitor (Bo). Giannella et al. (Am. J. Physiol.245: G492-G498) observed that the Kd for wild-type ST peptide in this same assay was ˜13 nm.

### EXAMPLE 6

### Pharmacokinetic Properties of SEQ ID NO:3

[0166] To study the pharmacokinetics of SEQ ID NO:3, absorbability studies in mice were performed by administering SEQ ID NO:3 intravaneously via tail vein injection or orally by gavage to 8-week-old CD1 mice. Serum was collected from the animals at various time points and tested for the presence of SEQ ID NO:3 using a competitive enzyme-linked immunoabsorbent assay (Oxoid, ST EIA kit, Cat#TD0700). The assay utilized monoclonal antibodies against ST peptide (antibodies are provided in the Oxoid kit) and synthetically manufactured SEQ ID NO:3. FIG. 10a shows absorption data for intravenously and orally administered SEQ ID NO:3 as detected by the ELISA assay. SEQ ID NO:3 appears to be minimally systemically absorbed and is <2.2% bioavailable.

[0167] A similar bioavailability study was performed in which LCMS rather than ELISA was used to detect SEQ ID NO:3. Initially, serum samples were extracted from the whole blood of exposed and control mice, then injected directly (lOmL) onto an in-line solid phase extraction (SPE) column (Waters Oasis HLB 25mm column, 2.0×15 mm direct connect) without further processing. The sample on the SPE column was washed with a 5% methanol, 95% dH₂O solution (2.1 mL/min, 1.0 minute), then loaded onto an analytical column using a valve switch that places the SPE column in an inverted flow path onto the analytical column (Waters Xterra MS C8 5 mm IS column, 2.1×20 mm). The sample was eluted from the analytical column with a reverse phase gradient (Mobile Phase A: 10 mM ammonium hydroxide in dH₂O, Mobile Phase B: 10 mM ammonium hydroxide in 80% acetonitrile and 20% methanol; 20% B for the first 3 minutes then ramping to 95% B over 4 min. and holding for 2 min., all at a flow rate of 0.4 mL/min.). At 9.1 minutes, the gradient returns to the initial conditions of 20% B for 1 min. SEQ ID NO:3 eluted from the analytical column at 1.45 minutes, and was detected by triple-quadrapole mass spectrometry (MRM, 764 (+2 charge state)>182 (+1 charge state) Da; cone voltage=30V; collision=20 eV; parent resolution=2 Da at base peak; daughter resolution=2 Da at base peak). Instrument response was converted into concentration units by comparison with a standard curve using known amounts of chemically synthesized SEQ ID NO:3 prepared and injected in mouse serum using the same procedure.

[0168] FIG. 10b shows absorption data for IV and orally administered SEQ ID NO:3 as detected by LCMS. In this assay, SEQ ID NO:3 appears similarly minimally systemically absorbed and is <0.11% bioavailable.

Administration of Peptides and GC-C Receptor Agonists

[0169] For treatment of gastrointestinal disorders, the peptides and agonists of the invention are preferably administered orally, e.g., as a tablet or cachet containing a predetermined amount of the active ingredient, pellet, gel, paste, syrup, bolus, electuary, slurry, capsule; powder; granules; as a solution or a suspension in an aqueous liquid or a non-aqueous liquid; as an oil-in-water liquid emulsion or a water-in-oil liquid emulsion, via a liposomal formulation (see, e.g., EP 736299) or in some other form. Orally administered compositions can include binders, lubricants, inert diluents, lubricating, surface active or dispersing agents, flavoring agents, and humectants. Orally administered formulations such as tablets may optionally be coated or scored and may be formulated so as to provide sustained, delayed or controlled release of the active ingredient therein. The peptides and agonists can be co-administered with other agents used to treat gastrointestinal disorders including but not limited to acid suppressing agents such as Histamine-2 receptor agonists (H2As) and proton pump inhibitors (PPIs). The peptides and agonists can also be administered by rectal suppository. For the treatment of disorders outside the gastrointestinal tract such as congestive heart failure and benign prostatic hypertrophy, peptides and agonists are preferably administered parenterally or orally.

[0170] The peptides described herein can be used alone or in combination with other agents. For example, the peptides can be administered together with an analgesic peptide or compound. The analgesic peptide or compound can be covalently attached to a peptide described herein or it can be a separate agent that is administered together with or sequentially with a peptide described herein in a combination therapy.

[0171] Combination therapy can be achieved by administering two or more agents, e.g., a peptide described herein and an analgesic peptide or compound, each of which is formulated and administered separately, or by administering two or more agents in a single formulation. Other combinations are also encompassed by combination therapy. For example, two agents can be formulated together and administered in conjunction with a separate formulation containing a third agent. While the two or more agents in the combination therapy can be administered simultaneously, they need not be. For example, administration of a first agent (or combination of agents) can precede administration of a second agent (or combination of agents) by minutes, hours, days, or weeks. Thus, the two or more agents can be administered within minutes of each other or within 1, 2, 3, 6, 9, 12, 15, 18, or 24 hours of each other or within 1, 2, 3, 4, 5, 6, 7, 8, 9, 10, 12, 14 days of each other or within 2, 3, 4, 5, 6, 7, 8, 9, or 10 weeks of each other. In some cases even longer intervals are possible. While in many cases it is desirable that the two or more agents used in a combination therapy be present in within the patient's body at the same time, this need not be so.

[0172] Combination therapy can also include two or more administrations of one or more of the agents used in the combination. For example, if agent X and agent Y are used in a combination, one could administer them sequentially in any combination one or more times, e.g., in the order X-Y-X, X-X-Y, Y-X-Y, Y-Y-X, X-X-Y-Y, etc.

[0173] The agents, alone or in combination, can be combined with any pharmaceutically acceptable carrier or medium. Thus, they can be combined with materials that do not produce an adverse, allergic or otherwise unwanted reaction when administered to a patient. The carriers or mediums used can include solvents, dispersants, coatings, absorption promoting agents, controlled release agents, and one or more inert excipients (which include starches, polyols, granulating agents, microcrystalline cellulose, diluents, lubricants, binders, disintegrating agents, and the like), etc. If desired, tablet dosages of the disclosed compositions may be coated by standard aqueous or nonaqueous techniques.

[0174] Compositions of the present invention may also optionally include other therapeutic ingredients, anti-caking agents, preservatives, sweetening agents, colorants, flavors, desiccants, plasticizers, dyes, and the like. Any such optional ingredient must be compatible with the compound of the invention to insure the stability of the formulation. The composition may contain other additives as needed, including for exanple lactose, glucose, fructose, galactose, trehalose, sucrose, maltose, raffinose, maltitol, melezitose, stachyose, lactitol, palatinite, starch, xylitol, mannitol, myoinositol, and the like, and hydrates thereof, and amino acids, for example alanine, glycine and betaine, and peptides and proteins, for example albumen.

[0175] Examples of excipients for use as the pharmaceutically acceptable carriers and the pharmaceutically acceptable inert carriers and the aforementioned additional ingredients include, but are not limited to binders, fillers, disintegrants, lubricants, anti-microbial agents, and coating agents such as:
[0176] BINDERS: corn starch, potato starch, other starches, gelatin, natural and synthetic gums such as acacia, sodium alginate, alginic acid, other alginates, powdered tragacanth, guar gum, cellulose and its derivatives (e.g., ethyl cellulose, cellulose acetate, carboxymethyl cellulose calcium, sodium carboxymethyl cellulose), polyvinyl pyrrolidone, methyl cellulose, pre-gelatinized starch (e.g., STARCH 1500® and STARCH 1500 LM®, sold by Colorcon, Ltd.), hydroxypropyl methyl cellulose, microcrystalline cellulose (e.g. AVICEL™, such as, AVICEL-PH-101™, -103™ and -105™, sold by FMC Corporation, Marcus Hook, Pa., USA), or mixtures thereof,
[0177] FILLERS: talc, calcium carbonate (e.g., granules or powder), dibasic calcium phosphate, tribasic calcium phosphate, calcium sulfate (e.g., granules or powder), microcrystalline cellulose, powdered cellulose, dextrates, kaolin, mannitol, silicic acid, sorbitol, starch, pre-gelatinized starch, or mixtures thereof,
[0178] DISINTEGRANTS: agar-agar, alginic acid, calcium carbonate, microcrystalline cellulose, croscarmellose sodium, crospovidone, polacrilin potassium, sodium starch glycolate, potato or tapioca starch, other starches, pre-gelatinized starch, clays, other algins, other celluloses, gums, or mixtures thereof,
[0179] LUBRICANTS: calcium stearate, magnesium stearate, mineral oil, light mineral oil, glycerin, sorbitol, mannitol, polyethylene glycol, other glycols, stearic acid, sodium lauryl sulfate, talc, hydrogenated vegetable oil (e.g., peanut oil, cottonseed oil, sunflower oil, sesame oil, olive oil, corn oil and soybean oil), zinc stearate, ethyl oleate, ethyl laurate, agar, syloid silica gel (AEROSIL 200, W.R. Grace Co., Baltimore, Md. USA), a coagulated aerosol of synthetic silica (Deaussa Co., Plano, Tex. USA), a pyrogenic silicon dioxide (CAB-O-SIL, Cabot Co., Boston, Mass. USA), or mixtures thereof,
[0180] ANTI-CAKING AGENTS: calcium silicate, magnesium silicate, silicon dioxide, colloidal silicon dioxide, talc, or mixtures thereof,
[0181] ANTIMICROBIAL AGENTS: benzalkonium chloride, benzethonium chloride, benzoic acid, benzyl alcohol, butyl paraben, cetylpyridinium chloride, cresol, chlorobutanol, dehydroacetic acid, ethylparaben, methylparaben, phenol, phenylethyl alcohol, phenoxyethanol, phenylmercuric acetate, phenylmercuric nitrate, potassium sorbate, propylparaben, sodium benzoate, sodium dehydroacetate, sodium propionate, sorbic acid, thimersol, thymo, or mixtures thereof, and
[0182] COATING AGENTS: sodium carboxymethyl cellulose, cellulose acetate phthalate, ethylcellulose, gelatin, pharmaceutical glaze, hydroxypropyl cellulose, hydroxypropyl methylcellulose, hydroxypropyl methyl cellulose phthalate, methylcellulose, polyethylene glycol, polyvinyl acetate phthalate, shellac, sucrose, titanium dioxide, camauba wax, microcrystalline wax, or mixtures thereof.

[0183] The agents either in their free form or as a salt can be combined with a polymer such as polylactic-glycoloic acid (PLGA), poly-(I)-lactic-glycolic-tartaric acid (P(I)LGT) (WO 01/12233), polyglycolic acid (U.S. Pat. No. 3,773,919), polylactic acid (U.S. Pat. No. 4,767,628), poly(ε-caprolactone) and poly(alkylene oxide) (U.S. 20030068384) to create a sustained release formulation. Such formulations can be used to implants that release a peptide or another agent over a period of a few days, a few weeks or several months depending on the polymer, the particle size of the polymer, and the size of the implant (see, e.g., U.S. Pat. No. 6,620,422). Other sustained release formulations and polymers for use in are described in EP 0 467 389 A2, WO 93/24150, U.S. Pat. No. 5,612,052, WO 97/40085, WO 03/075887, WO 01/01964A2, U.S. Pat. No. 5,922,356, WO 94/155587, WO 02/074247A2, WO 98/25642, U.S. Pat. No. 5,968,895, U.S. Pat. No. 6,180,608, U.S. 20030171296, U.S. 20020176841, U.S. Pat. No. 5,672,659, U.S. Pat. No. 5,893,985, U.S. Pat. No. 5,134,122, U.S. Pat. No. 5,192,741, U.S. Pat. No. 5,192,741, U.S. Pat. No. 4,668,506, U.S. Pat. No. 4,713,244, U.S. Pat. No. 5,445,832 U.S. Pat. No. 4,931,279, U.S. Pat. No. 5,980,945, WO 02/058672, WO 9726015, WO 97/04744, and. US20020019446. In such sustained release formulations microparticles of peptide are combined with microparticles of polymer. One or more sustained release implants can be placed in the large intestine, the small intestine or both. U.S. Pat. No. 6,011,011 and WO 94/06452 describe a sustained release formulation providing either polyethylene glycols (i.e. PEG 300 and PEG 400) or triacetin. WO 03/053401 describes a formulation which may both enhance bioavailability and provide controlled releaseof the agent within the GI tract. Additional controlled release formulations are described in WO 02/38129, EP 326 151, U.S. Pat. No. 5,236,704, WO 02/30398, WO 98/13029; U.S. 20030064105, U.S. 20030138488A1, U.S. Pat. No. 20030216307A1, U.S. Pat. No. 6,667,060, WO 01/49249, WO 01/49311, WO 01/49249, WO 01/49311, and U.S. Pat. No. 5,877,224.

[0184] The agents can be administered, e.g., by intravenous injection, intramuscular injection, subcutaneous injection, intraperitoneal injection, topical, sublingual, intraarticular (in the joints), intradermal, buccal, ophthalmic (including intraocular), intranasaly (including using a cannula), or by other routes. The agents can be administered orally, e.g., as a tablet or cachet containing a predetermined amount of the active ingredient, gel, pellet, paste, syrup, bolus, electuary, slurry, capsule, powder, granules, as a solution or a suspension in an aqueous liquid or a non-aqueous liquid, as an oil-in-water liquid emulsion or a water-in-oil liquid emulsion, via a micellar formulation (see, e.g. WO 97/11682) via a liposomal formulation (see, e.g., EP 736299,WO 99/59550 and WO 97/13500), via formulations described in WO 03/094886 or in some other form. Orally administered compositions can include binders, lubricants, inert diluents, lubricating, surface active or dispersing agents, flavoring agents, and humectants. Orally administered formulations such as tablets may optionally be coated or scored and may be formulated so as to provide sustained, delayed or controlled release of the active ingredient therein. The agents can also be administered transdermally (i.e. via reservoir-type or matrix-type patches, microneedles, thermal poration, hypodermic needles, iontophoresis, electroporation, ultrasound or other forms of sonophoresis, jet injection, or a combination of any of the preceding methods (Prausnitz et al. 2004, Nature Reviews Drug Discovery 3:115-124)). The agents can be administered using high-velocity transdermal particle injection techniques using the hydrogel particle formulation described in U.S. 20020061336. Additional particle formulations are described in WO 00/45792, WO 00/53160, and WO 02/19989. An example of a transdermal formulation containing plaster and the absorption promoter dimethylisosorbide can be found in WO 89/04179. WO 96/11705 provides formulations suitable for transdermal adminisitration. The agents can be administered in the form a suppository or by other vaginal or rectal means. The agents can be administered in a transmembrane formulation as described in WO 90/07923. The agents can be administed non-invasively via the dehydrated particicles described in U.S. Pat. No. 6,485,706. The agent can be administered in an enteric-coated drug formulation as described in WO 02/49621. The agents can be administered intranassaly using the formulation described in U.S. Pat. No. 5,179,079. Formulations suitable for parenteral injection are described in WO 00/62759. The agents can be administered using the casein formulation described in U.S. Pat. No. 20030206939 and WO 00/06108. The agents can be administered using the particulate formulations described in U.S. 20020034536.

[0185] The agents, alone or in combination with other suitable components, can be administered by pulmonary route utilizing several techniques including but not limited to intratracheal instillation (delivery of solution into the lungs by syringe), intratracheal delivery of liposomes, insufflation (administration of powder formulation by syringe or any other similar device into the lungs) and aerosol inhalation. Aerosols (e.g., jet or ultrasonic nebulizers, metered-dose inhalers (MDIs), and dry-powder inhalers (DPIs)) can also be used in intranasal applications. Aerosol formulations are stable dispersions or suspensions of solid material and liquid droplets in a gaseous medium and can be placed into pressurized acceptable propellants, such as hydrofluroalkanes (HFAs, i.e. HFA-134a and HFA-227, or a mixture thereof), dichlorodifluoromethane (or other chlorofluocarbon propellants such as a mixture of Propellants 11, 12, and/or 114), propane, nitrogen, and the like. Pulmonary formulations may include permeation enhancers such as fatty acids, and saccharides, chelating agents, enzyme inhibitors (e.g., protease inhibitors), adjuvants (e.g., glycocholate, surfactin, span 85, and nafamostat), preservatives (e.g., benzalkonium chloride or chlorobutanol), and ethanol (normally up to 5% but possibly up to 20%, by weight). Ethanol is commonly included in aerosol compositions as it can improve the function of the metering valve and in some cases also improve the stability of the dispersion. Pulmonary formulations may also include surfactants which include but are not limited to bile salts and those described in U.S. Pat. No. 6,524,557 and references therein. The surfactants described in U.S. Pat. No. 6,524,557, e.g., a C8-C16 fatty acid salt, a bile salt, a phospholipid, or alkyl saccaride are advantageous in that some of them also reportedly enhance absorption of the peptide in the formulation. Also suitable in the invention are dry powder formulations comprising a therapeutically effective amount of active compound blended with an appropriate carrier and adapted for use in connection with a dry-powder inhaler. Absorption enhancers which can be added to dry powder formulations of the present invention include those described in U.S. Pat. No. 6,632,456. WO 02/080884 describes new methods for the surface modification of powders. Aerosol formulations may include U.S. Pat. No. 5,230,884, U.S. Pat. No. 5,292,499, WO 017/8694, WO 01/78696, U.S. 2003019437, U.S. 20030165436, and WO 96/40089 (which includes vegetable oil). Sustained release formulations suitable for inhalation are described in U.S. 20010036481A1, 20030232019A1, and U.S. 20040018243A1 as well as in WO 01/13891, WO 02/067902, WO 03/072080, and WO 03/079885. Pulmonary formulations containing microparticles are described in WO 03/015750, U.S. 20030008013, and WO 00/00176. Pulmonary formulations containing stable glassy state powder are described in U.S. 20020141945 and U.S. Pat. No. 6,309,671. Other aerosol formulations are desribed in EP 1338272A1 WO 90/09781, U.S. Pat. No. 5,348,730, U.S. Pat. No. 6,436,367, WO 91/04011, and U.S. Pat. No. 6,294,153 and U.S. Pat. No. 6,290,987 describes a liposomal based formulation that can be administered via aerosol or other means. Powder formulations for inhalation are described in U.S. 20030053960 and WO 01/60341. The agents can be administered intranasally as described in U.S. 20010038824.

[0186] Solutions of medicament in buffered saline and similar vehicles are commonly employed to generate an aerosol in a nebulizer. Simple nebulizers operate on Bernoulli's principle and employ a stream of air or oxygen to generate the spray particles. More complex nebulizers employ ultrasound to create the spray particles. Both types are well known in the art and are described in standard textbooks of pharmacy such as Sprowls' American Pharmacy and Remington's The Science and Practice of Pharmacy. Other devices for generating aerosols employ compressed gases, usually hydrofluorocarbons and chlorofluorocarbons, which are mixed with the medicament and any necessary excipients in a pressurized container, these devices are likewise described in standard textbooks such as Sprowls and Remington. The agents can be a free acid or base, or a pharmacologically acceptable salt thereof. Solids can be dissolved or dispersed immediately prior to administration or earlier. In some circumstances the preparations include a preservative to prevent the growth of microorganisms. The pharmaceutical forms suitable for injection can include sterile aqueous or organic solutions or dispersions which include, e.g., water, an alcohol, an organic solvent, an oil or other solvent or dispersant (e.g., glycerol, propylene glycol, polyethylene glycol, and vegetable oils). The formulations may contain antioxidants, buffers, bacteriostats, and solutes that render the formulation isotonic with the blood of the intended recipient, and aqueous and non-aqueous sterile suspensions that can include suspending agents, solubilizers, thickening agents, stabilizers, and preservatives. Pharmaceutical agents can be sterilized by filter sterilization or by other suitable means.

[0187] The agent can be fused to immunoglobulins or albumin, or incorporated into a lipsome to improve half-life. The agent can also be conjugated to polyethylene glycol (PEG) chains. Methods for pegylation and additional formulations containing PEG-conjugates (i.e. PEG-based hydrogels, PEG modified liposomes) can be found in Harris and Chess, Nature Reviews Drug Discovery 2: 214-221 and the references therein. Peptides can also be modified with alkyl groups (e.g., C1-C20 straight or branched alkyl groups); fatty acid radicals; and combinations of PEG, alkyl groups and fatty acid radicals (see U.S. Pat. No. 6,309,633; Soltero et al., 2001 Innovations in Pharmaceutical Technology 106-110. The agent can be administered via a nanocochleate or cochleate delivery vehicle (BioDelivery Sciences International). The agents can be delivered transmucosally (i.e. across a mucosal surface such as the vagina, eye or nose) using formulations such as that described in U.S. Pat. No. 5,204,108. The agents can be formulated in microcapsules as described in WO 88/01165. The agent can be administered intra-orally using the formulations described in U.S. 20020055496, WO 00/47203, and U.S. Pat. No. 6,495,120. The agent can be delivered using nanoemulsion formulations described in WO 01/91728A2.

[0188] Suitable pharmaceutical compositions in accordance with the invention will generally include an amount of the active compound(s) with an acceptable pharmaceutical diluent or excipient, such as a sterile aqueous solution, to give a range of final concentrations, depending on the intended use. The techniques of preparation are generally well known in the art, as exemplified by Remington's Pharmaceutical Sciences (18th Edition, Mack Publishing Company, 1995).

[0189] The agents described herein and combination therapy agents can be packaged as a kit that includes single or multiple doses of two or more agents, each packaged or formulated individually, or single or multiple doses of two or more agents packaged or formulated in combination. Thus, one or more agents can be present in first container, and the kit can optionally include one or more agents in a second container. The container or containers are placed within a package, and the package can optionally include administration or dosage instructions. A kit can include additional components such as syringes or other means for administering the agents as well as diluents or other means for formulation.

[0190] Methods to increase chemical and/or physical stability of the agents the described herein are found in U.S. Pat. No. 6,541,606, U.S. Pat. No. 6,068,850, U.S. Pat. No. 6,124,261, U.S. Pat. No. 5,904,935, and WO 00/15224, U.S. 20030069182 (via the additon of nicotinamide), U.S. 20030175230A1, U.S. 20030175230A1, U.S. 20030175239A1, U.S. 20020045582, U.S. 20010031726, WO 02/26248, WO 03/014304, WO 98/00152A1, WO 98/00157A1, WO 90/12029, WO 00/04880, and WO 91/04743, WO 97/04796 and the references cited therein.

[0191] Methods to increase bioavailability of the agents described herein are found in U.S. Pat. No. 6,008,187, U.S. Pat. No. 5,424,289, U.S. 20030198619, WO 90/01329, WO 01/49268, WO 00/32172, and WO 02/064166. Glycyrrhizinate can also be used as an absorption enhancer (see, e.g., EP397447). WO 03/004062 discusses Ulex europaeus I (UEAl) and UEAI mimetics which may be used to target the agents of the invention to the GI tract.

Analgesic Agents

[0192] The peptides described herein can be used in combination therapy with an analgesic agent, e.g., an analgesic compound or an analgesic peptide. The analgesic agent can optionally be covalently attached to a peptide described herein. Among the useful analgesic agents are: Ca channel blockers, 5HT receptor antagonists (for example 5HT3, 5HT4 and 5HT1 receptor antagonists), opioid receptor agonists (loperamide, fedotozine, and fentanyl), NK1 receptor antagonists, CCK receptor agonists (e.g., loxiglumide), NK1 receptor antagonists, NK3 receptor antagonists, norepinephrine-serotonin reuptake inhibitors (NSRI), vanilloid and cannabanoid receptor agonists, and sialorphin. Analgesics agents in the various classes are described in the literature.

[0193] Among the useful analgesic peptides are sialorphin-related peptides, including those comprising the amino acid sequence QHNPR (SEQ ID NO:1661), including: VQHNPR (SEQ ID NO:1662); VRQHNPR (SEQ ID NO:1663); VRGQHNPR (SEQ ID NO:1664); VRGPQHNPR (SEQ ID NO:1665); VRGPRQHNPR (SEQ ID NO:1666); VRGPRRQHNPR (SEQ ID NO:1667); and RQHNPR (SEQ ID NO:1668). Sialorphin-related peptides bind to neprilysin and inhibit neprilysin-mediated breakdown of substance P and Met-enkephalin. Thus, compounds or peptides that are inhibitors of neprilysin are useful analgesic agents which can be administered with the peptides of the invention in a co-therapy or linked to the peptides of the invention, e.g., by a covalent bond. Sialophin and related peptides are described in U.S. Pat. No. 6,589,750; U.S. 20030078200 A1; and WO 02/051435 A2.

[0194] Opioid receptor antagonists and agonists can be administered with the peptides of the invention in co-therapy or linked to the peptide of the invention, e.g., by a covalent bond. For example, opioid receptor antagonists such as naloxone, naltrexone, methyl nalozone, nalmefene, cypridime, beta funaltrexamine, naloxonazine, naltrindole, and nor-binaltorphimine are thought to be useful in the treatment of IBS. It can be useful to formulate opioid antagonists of this type is a delayed and sustained release formulation such that initial release of the antagonist is in the mid to distal small intestine and/or ascending colon. Such antagonists are described in WO 01/32180 A2. Enkephalin pentapeptide (HOE825; Tyr-D-Lys-Gly-Phe-L-homoserine) is an agonist of the mu and delta opioid receptors and is thought to be useful for increasing intestinal motility (Eur. J. Pharm. 219:445, 1992), and this peptide can be used in conjunction with the peptides of the invention. Also useful is trimebutine which is thought to bind to mu/delta/kappa opioid receptors and activate release of motilin and modulate the release of gastrin, vasoactive intestinal peptide, gastrin and glucagons. Kappa opioid receptor agonists such as fedotozine, ketocyclazocine, and compounds described in WO 03/097051 A2 can be used with or linked to the peptides of the invention. In addition, mu opioid receptor agonists such as morphine, diphenyloxylate, frakefamide (H-Tyr-D-Ala-Phe(F)-Phe-NH₂; WO 01/019849 A1) and loperamide can be used.

[0195] Tyr-Arg (kyotorphin) is a dipeptide that acts by stimulating the release of met-enkephalins to elicit an analgesic effect (J. Biol. Chem. 262:8165, 1987). Kyotorphin can be used with or linked to the peptides of the invention.

[0196] CCK receptor agonists such as caerulein from amphibians and other species are useful analgesic agents that can be used with or linked to the peptides of the invention.

[0197] Conotoxin peptides represent a large class of analgesic peptides that act at voltage gated Ca channels, NMDA receptors or nicotinic receptors. These peptides can be used with or linked to the peptides of the invention.

[0198] Peptide analogs of thymulin (FR 2830451) can have analgesic activity and can be used with or linked to the peptides of the invention.

[0199] CCK (CCKa or CCKb) receptor antagonists, including loxiglumide and dexloxiglumide (the R-isomer of loxiglumide) (WO 88/05774) can have analgesic activity and can be used with or linked to the peptides of the invention.

[0200] Other useful analgesic agents include 5-HT4 agonists such as tegaserod/zelnorm and lirexapride. Such agonists are described in: EP1321142 A1, WO 03/053432A1, EP 505322 A1, EP 505322 B1, U.S. Pat. No. 5,510,353, EP 507672 A1, EP 507672 B1, and U.S. Pat. No. 5,273,983.

[0201] Calcium channel blockers such as ziconotide and related compounds described in, for example, EP 625162B1, U.S. Pat. No. 5,364,842, U.S. Pat. No. 5,587,454, U.S. Pat. No. 5,824,645, U.S. Pat. No. 5,859,186, U.S. Pat. No. 5,994,305, U.S. Pat. No. 6,087,091, U.S. Pat. No. 6,136,786, WO 93/13128 A1, EP 1336409 A1, EP 835126 A1, EP 835126 B1, U.S. Pat. No. 5,795,864, U.S. Pat. No. 5,891,849, U.S. Pat. No. 6,054,429, WO 97/01351 A1, can be used with or linked to the peptides of the invention.

[0202] Various antagonists of the NK-1, NK-2, and NK-3 receptors (for a review see Giardina et al. 2003 Drugs 6:758) can be can be used with or linked to the peptides of the invention.

[0203] NK1 receptor antagonists such as: aprepitant (Merck & Co Inc), vofopitant, ezlopitant (Pfizer, Inc.), R-673 (Hoffinann-La Roche Ltd), SR-14033 and related compounds described in, for example, EP 873753 A1, U.S. 20010006972 A1, U.S. 20030109417 A1, WO 01/52844 A1, can be used with or linked to the peptides of the invention.

[0204] NK-2 receptor antagonists such as nepadutant (Menarini Ricerche SpA), saredutant (Sanofi-Synthelabo), SR-144190 (Sanofi-Synthelabo) and UK-290795 (Pfizer Inc) can be used with or linked to the peptides of the invention.

[0205] NK3 receptor antagonists such as osanetant (Sanofi-Synthelabo), talnetant and related compounds described in, for example, WO 02/094187 A2, EP 876347 A1, WO 97/21680 A1, U.S. Pat. No. 6,277,862, WO 98/11090, WO 95/28418, WO 97/19927, and Boden et al. (J Med Chem. 39:1664-75, 1996) can be used with or linked to the peptides of the invention.

[0206] Norepinephrine-serotonin reuptake inhibitors such as milnacipran and related compounds described in WO 03/077897 A1 can be used with or linked to the peptides of the invention.

[0207] Vanilloid receptor antagonists such as arvanil and related compounds described in WO 01/64212 A1 can be used with or linked to the peptides of the invention.

[0208] Where the analgesic is a peptide and is covalently linked to a peptide described herein the resulting peptide may also include at least one trypsin or chymotrypsin cleavage site. When present within the peptide, the analgesic peptide may be preceded by (if it is at the carboxy terminus) or followed by (if it is at the amino terminus) a chymotrypsin or trypsin cleavage site that allows release of the analgesic peptide.

[0209] In addition to sialorphin-related peptides, analgesic peptides include: AspPhe, endomorphin-1, endomorphin-2, nocistatin, dalargin, lupron, zicnotide, and substance P.

Methods of Treatment

[0210] The peptides of the invention can be used alone or in combination therapy for the treatment or prevention of cancer, pre-cancerous growths, or metastatic growths. For example, they can be used for the prevention or treatment of: colorectal/local metastasized colorectal cancer, gastrointestinal tract cancer, lung cancer, cancer or pre-cancerous growths or metastatic growths of epithelial cells, polyps, breast, colorectal, lung, ovarian, pancreatic, prostatic, renal, stomach, bladder, liver, esophageal and testicular carcinoma, carcinoma (e.g., basal cell, basosquamous, Brown-Pearce, ductal carcinoma, Ehrlich tumor, Krebs, Merkel cell, small or non-small cell lung, oat cell, papillary, bronchiolar, squamous cell, transitional cell, Walker), leukemia (e.g., B-cell, T-cell, HTLV, acute or chronic lymphocytic, mast cell, myeloid), histiocytonia, histiocytosis, Hodgkin's disease, non-Hodgkin's lymphoma, plasmacytoma, reticuloendotheliosis, adenoma, adeno-carcinoma, adenofibroma, adenolymphoma, ameloblastoma, angiokeratoma, angiolymphoid hyperplasia with eosinophilia, sclerosing angioma, angiomatosis, apudoma, branchionia, malignant carcinoid syndrome, carcinoid heart disease, carcinosarcoma, cementoma, cholangioma, cholesteatoma, chondrosarcoma, chondroblastoma, chondrosarcoma, chordoma, choristoma, craniopharyngioma, chrondroma, cylindroma, cystadenocarcinoma, cystadenoma, cystosarconia phyllodes, dysgenninoma, ependymoma, Ewing sarcoma, fibroma, fibrosarcoma, giant cell tumor, ganglioneuroma, glioblastoma, glomangioma, granulosa cell tumor, gynandroblastoma, hamartoma, hemangioendothelioma, hemangioma, hemangiopericytoma, hemangiosarcoma, hepatoma, islet cell tumor, Kaposi sarcoma, leiomyoma, leiomyosarcoma, leukosarcoma, Leydig cell tumor, lipoma, liposarcoma, lymphaugioma, lymphangiomyoma, lymphangiosarcoma, medulloblastoma, meningioma, mesenchymoma, mesonephroma, mesothelioma, myoblastoma, myoma, myosarcoma, myxoma, myxosarcoma, neurilemmoma, neuroma, neuroblastoma, neuroepithelioma, neurofibroma, neurofibromatosis, odontoma, osteoma,, osteosarcoma, papilloma, paraganglioma, paraganglionia. nonchroinaffin, pinealoma, rhabdomyoma, rhabdomyosarcoma, Sertoli cell tumor, teratoma, theca cell tumor, and other diseases in which cells have become dysplastic, immortalized, or transformed.

[0211] The peptides of the invention can be used alone or in combination therapy for the treatment or prevention of: Familial Adenomatous Polyposis (FAP) (autosomal dominant syndrome) that precedes colon cancer, hereditary nonpolyposis colorectal cancer (HNPCC), and inherited autosomal dominant syndrome.

[0212] For treatment or prevention of cancer, pre-cancerous growths and metastatic growths, the peptides can be used in combination therapy with radiation or chemotherapeutic agents, an inhibitor of a cGMP-dependent phosphodiesterase or a selective cyclooxygenase-2 inhibitor (a number of selective cyclooxygenase-2 inhibitors are described in WO02062369, hereby incorporated by reference).

[0213] The peptides can be for treatment or prevention of inflammation. Thus, they can be used alone or in combination with inhibitor of cGMP-dependent phosphodiesterase or a selective cyclooxygenase-2 inhibitor for treatment of: organ inflammation, IBD (e.g, Crohn's disease, ulcerative colitis), asthma, nephritis, hepatitis, pancreatitis, bronchitis, cystic fibrosis, ischemic bowel diseases, intestinal inflammations/allergies, coeliac disease, proctitis, eosnophilic gastroenteritis, mastocytosis, and other inflammatory disorders.

[0214] The peptides can also be used alone or in combination therapy to treat or prevent insulin-related disorders, for example: II diabetes mellitus, hyperglycemia, obesity, disorders associated with disturbances in glucose or electrolyte transport and insulin secretion in cells, or endocrine disorders. They can be also used in insulin resistance treatment and post-surgical and non-post surgery decrease in insulin responsiveness.

[0215] The peptides can be used alone or in combination therapy to prevent or treat respiratory disorders, including, inhalation, ventilation and mucus secretion disorders, pulmonary hypertension, chronic obstruction of vessels and airways, and irreversible obstructions of vessels and bronchi.

[0216] The peptides can be used in combination therapy with a phosphodiesterase inhibitor (examples of such inhibitors can be found in U.S. Pat. No. 6,333,354, hereby incorporated by reference).

[0217] The peptides can also be used alone or in combination therapy to prevent or treat: retinopathy, nephropathy, diabetic angiopathy, and edema formation

[0218] The peptides can also be used alone or in combination therapy to prevent or treat neurological disorders, for example, headache, anxiety, movement disorders, aggression, psychosis, seizures, panic attacks, hysteria, sleep disorders, depression, schizoaffective disorders, sleep apnea, attention deficit syndromes, memory loss, and narcolepsy. They may also be used alone or in combination therapy as a sedative.

[0219] The peptides and detectabley labeled peptides can be used alone or in combination therapy as markers to identify, detect, stage, or diagnosis diseases and conditions of the small intestine, including:
[0220] Crohn's disease, colitis, inflammatory bowel disease, tumors, benign tumors, such as benign stromal tumors, adenoma, angioma, adenomatous (pedunculated and sessile) polyps, malignant, carcinoid tumors, endocrine cell tumors, lymphoma, adenocarcinoma, foregut, midgut, and hindgut carcinoma, gastroinstestinal stromal tumor (GIST), such as leiomyoma, cellular leiomyoma, leiomyoblastoma, and leiomyosarcoma, gastrointestinal autonomic nerve tumor, malabsorption syndromes, celiac diseases, diverticulosis, Meckel's diverticulum, colonic diverticula, megacolon, Hirschsprung's disease, irritable bowel syndrome, mesenteric ischemia, ischemic colitis, colorectal cancer, colonic polyposis, polyp syndrome, intestinal adenocarcinoma, Liddle syndrome, Brody myopathy, infantile convulsions, and choreoathetosis

[0221] The peptides can be conjugated to another molecule (e.g, a diagnostic or therapeutic molecule) to target cells bearing the GCC receptor, e.g., cystic fibrosis lesions and specific cells lining the intestinal tract. Thus, they can be used to target radioactive moieties or therapeutic moieties to the intestine to aid in imaging and diagnosing or treating colorectal/metastasized or local colorectal cancer and to deliver normal copies of the p53 tumor suppressor gene to the intestinal tract.

[0222] The peptides can be used alone or in combination therapy to treat erectile dysfunction.

[0223] The peptides can be used alone or in combination therapy to treat inner ear disorders, e.g., to treat Meniere's disease, including symptoms of the disease such as vertigo, hearing loss, tinnitus, sensation of fullness in the ear, and to maintain fluid homeostasis in the inner ear.

[0224] The peptides can be used alone or in combination therapy to treat disorders associated with fluid and sodium retention, e.g., diseases of the electrolyte-water/electrolyte transport system within the kidney, gut and urogenital system, congestive heart failure, hypertension, hypotension, liver cirrhosis, and nephrotic syndrome. In addition they can be used to facilitate diuresis or control intestinal fluid.

[0225] The peptides can be used alone or in combination therapy to treat disorders associated with chloride or bicarbonate secretion, e.g., Cystic Fibrosis.

[0226] The peptides can be used alone or in combination therapy to treat disorders associated with bile secretion. In addition, they can be used to facilitate or control chloride and bile fluid secretion in the gall bladder.

[0227] The peptides can be used alone or in combination therapy to treat disorders associated with liver cell regeneration.

The application's sequence listing, which the Patent Office published only in electronic form, follows.

SEQUENCE LISTING (1675 sequences)

SEQ ID NO: 1 - protein, 21 aa, Artificial Sequence
  Synthetically generated peptide
  VARIANT 1, 2, 3, 4: Xaa = missing
  VARIANT 1, 2, 3, 4, 5: Xaa = Xaa1 = Asn, Xaa2 =  Ser, Xaa3 = Ser, Xaa4 = Asn, Xaa5 = Tyr; or is missing
  VARIANT 8, 9, 12, 13, 14, 17, 19: Xaa = any amino acid
  VARIANT 16: Xaa = Thr, Ala, Asn, Lys, Arg, Trp
  VARIANT 20: Xaa = Asp Asn or Glu or is missing
  VARIANT 21: Xaa = Phe or missing
XXXXXCCXXCCXXXCXXCXXX

SEQ ID NO: 2 - protein, 21 aa, Artificial Sequence
  Synthetically generated peptide
  VARIANT 9: Xaa = any amino acid; or Xaa = any amino acid other than Leu; or Xaa = Phe, Trp, and Tyr; or selected from from any other natural or non-natural aromatic amino acid; or Xaa = Tyr
  VARIANT 1, 2, 3, 4, 5: Xaa1 = Asn, Xaa2 = Ser, Xaa3 = Ser, Xaa4 = Asn, Xaa5 = Tyr;  or Xaa1-Xaa5 is missing; or Xaa1-Xaa4 is missing; or Xaa1 -Xaa3 is missing; or Xaa1 and Xaa2 is missing; or Xaa1 is missing
  VARIANT 20, 21: Xaa20 = Asp, Xaa21 = Phe or missing; or Xaa20 = Asn or Glu or missing;
XXXXXCCEXCCNPACTGCYXX

SEQ ID NO: 3 - protein, 14 aa, Artificial Sequence
  Synthetically generated peptide
CCEYCCNPACTGCY

SEQ ID NO: 4 - protein, 19 aa, Artificial Sequence
  Synthetically generated peptide
NSSNYCCELCCNPACTGCY

SEQ ID NO: 5 - protein, 19 aa, Artificial Sequence
  Synthetically generated peptide
NSSNYCCEYCCNPACTGCY

SEQ ID NO: 6 - protein, 14 aa, Artificial Sequence
  Synthetically generated peptide
CCELCCNPACTGCY

SEQ ID NO: 7 - protein, 19 aa, Artificial Sequence
  Synthetically generated peptide
NSSNYCCELCCNPACWGCY

SEQ ID NO: 8 - protein, 14 aa, Artificial Sequence
  Synthetically generated peptide
CCELCCNPACWGCY

SEQ ID NO: 9 - protein, 15 aa, Artificial Sequence
  Synthetically generated peptide
NCCELCCNPACTGCY

SEQ ID NO: 10 - protein, 15 aa, Artificial Sequence
  Synthetically generated peptide
NCCELCCNPACWGCY

SEQ ID NO: 11 - protein, 15 aa, Artificial Sequence
  Synthetically generated peptide
NCCEFCCNPACTGCY

SEQ ID NO: 12 - protein, 15 aa, Artificial Sequence
  Synthetically generated peptide
NCCEYCCNPACTGCY

SEQ ID NO: 13 - protein, 15 aa, Artificial Sequence
  Synthetically generated peptide
NCCEWCCNPACTGCY

SEQ ID NO: 14 - protein, 15 aa, Artificial Sequence
  Synthetically generated peptide
NCCERCCNPACTGCY

SEQ ID NO: 15 - protein, 15 aa, Artificial Sequence
  Synthetically generated peptide
NCCEKCCNPACTGCY

SEQ ID NO: 16 - protein, 21 aa, Artificial Sequence
  Synthetically generated peptide
NSSNYCCELCCNPACTGCYDF

SEQ ID NO: 17 - protein, 21 aa, Artificial Sequence
  Synthetically generated peptide
NSSNYCCELCCNPACWGCYDF

SEQ ID NO: 18 - protein, 21 aa, Artificial Sequence
  Synthetically generated peptide
NSSNYCCEFCCNPACTGCYDF

SEQ ID NO: 19 - protein, 21 aa, Artificial Sequence
  Synthetically generated peptide
NSSNYCCEYCCNPACTGCYDF

SEQ ID NO: 20 - protein, 21 aa, Artificial Sequence
  Synthetically generated peptide
NSSNYCCEWCCNPACTGCYDF

SEQ ID NO: 21 - protein, 21 aa, Artificial Sequence
  Synthetically generated peptide
NSSNYCCERCCNPACTGCYDF

SEQ ID NO: 22 - protein, 21 aa, Artificial Sequence
  Synthetically generated peptide
NSSNYCCEKCCNPACTGCYDF

SEQ ID NO: 23 - protein, 16 aa, Artificial Sequence
  Synthetically generated peptide
CCELCCNPACTGCYDF

SEQ ID NO: 24 - protein, 16 aa, Artificial Sequence
  Synthetically generated peptide
CCELCCNPACWGCYDF

SEQ ID NO: 25 - protein, 16 aa, Artificial Sequence
  Synthetically generated peptide
CCEFCCNPACTGCYDF

SEQ ID NO: 26 - protein, 16 aa, Artificial Sequence
  Synthetically generated peptide
CCEYCCNPACTGCYDF

SEQ ID NO: 27 - protein, 16 aa, Artificial Sequence
  Synthetically generated peptide
CCEWCCNPACTGCYDF

SEQ ID NO: 28 - protein, 16 aa, Artificial Sequence
  Synthetically generated peptide
CCERCCNPACTGCYDF

SEQ ID NO: 29 - protein, 16 aa, Artificial Sequence
  Synthetically generated peptide
CCEKCCNPACTGCYDF

SEQ ID NO: 30 - protein, 17 aa, Artificial Sequence
  Synthetically generated peptide
NCCELCCNPACTGCYDF

SEQ ID NO: 31 - protein, 17 aa, Artificial Sequence
  Synthetically generated peptide
NCCELCCNPACWGCYDF

SEQ ID NO: 32 - protein, 17 aa, Artificial Sequence
  Synthetically generated peptide
NCCEFCCNPACTGCYDF

SEQ ID NO: 33 - protein, 17 aa, Artificial Sequence
  Synthetically generated peptide
NCCEYCCNPACTGCYDF

SEQ ID NO: 34 - protein, 17 aa, Artificial Sequence
  Synthetically generated peptide
NCCEWCCNPACTGCYDF

SEQ ID NO: 35 - protein, 17 aa, Artificial Sequence
  Synthetically generated peptide
NCCERCCNPACTGCYDF

SEQ ID NO: 36 - protein, 17 aa, Artificial Sequence
  Synthetically generated peptide
NCCEKCCNPACTGCYDF

SEQ ID NO: 37 - protein, 19 aa, Artificial Sequence
  Synthetically generated peptide
QSSNYCCEYCCNPACTGCY

SEQ ID NO: 38 - protein, 19 aa, Artificial Sequence
  Synthetically generated peptide
NTSNYCCEYCCNPACTGCY

SEQ ID NO: 39 - protein, 19 aa, Artificial Sequence
  Synthetically generated peptide
NLSNYCCEYCCNPACTGCY

SEQ ID NO: 40 - protein, 19 aa, Artificial Sequence
  Synthetically generated peptide
NISNYCCEYCCNPACTGCY

SEQ ID NO: 41 - protein, 19 aa, Artificial Sequence
  Synthetically generated peptide
NSSQYCCEYCCNPACTGCY

SEQ ID NO: 42 - protein, 18 aa, Artificial Sequence
  Synthetically generated peptide
SSNYCCEYCCNPACTGCY

SEQ ID NO: 43 - protein, 19 aa, Artificial Sequence
  Synthetically generated peptide
QSSQYCCEYCCNPACTGCY

SEQ ID NO: 44 - protein, 18 aa, Artificial Sequence
  Synthetically generated peptide
SSQYCCEYCCNPACTGCY

SEQ ID NO: 45 - protein, 19 aa, Artificial Sequence
  Synthetically generated peptide
NSSNYCCEACCNPACTGCY

SEQ ID NO: 46 - protein, 19 aa, Artificial Sequence
  Synthetically generated peptide
NSSNYCCERCCNPACTGCY

SEQ ID NO: 47 - protein, 19 aa, Artificial Sequence
  Synthetically generated peptide
NSSNYCCENCCNPACTGCY

SEQ ID NO: 48 - protein, 19 aa, Artificial Sequence
  Synthetically generated peptide
NSSNYCCEDCCNPACTGCY

SEQ ID NO: 49 - protein, 19 aa, Artificial Sequence
  Synthetically generated peptide
NSSNYCCECCCNPACTGCY

SEQ ID NO: 50 - protein, 19 aa, Artificial Sequence
  Synthetically generated peptide
NSSNYCCEQCCNPACTGCY

SEQ ID NO: 51 - protein, 19 aa, Artificial Sequence
  Synthetically generated peptide
NSSNYCCEECCNPACTGCY

SEQ ID NO: 52 - protein, 19 aa, Artificial Sequence
  Synthetically generated peptide
NSSNYCCEGCCNPACTGCY

SEQ ID NO: 53 - protein, 19 aa, Artificial Sequence
  Synthetically generated peptide
NSSNYCCEHCCNPACTGCY

SEQ ID NO: 54 - protein, 19 aa, Artificial Sequence
  Synthetically generated peptide
NSSNYCCEICCNPACTGCY

SEQ ID NO: 55 - protein, 19 aa, Artificial Sequence
  Synthetically generated peptide
NSSNYCCEKCCNPACTGCY

SEQ ID NO: 56 - protein, 19 aa, Artificial Sequence
  Synthetically generated peptide
NSSNYCCEMCCNPACTGCY

SEQ ID NO: 57 - protein, 19 aa, Artificial Sequence
  Synthetically generated peptide
NSSNYCCEFCCNPACTGCY

SEQ ID NO: 58 - protein, 19 aa, Artificial Sequence
  Synthetically generated peptide
NSSNYCCEPCCNPACTGCY

SEQ ID NO: 59 - protein, 19 aa, Artificial Sequence
  Synthetically generated peptide
NSSNYCCESCCNPACTGCY

SEQ ID NO: 60 - protein, 19 aa, Artificial Sequence
  Synthetically generated peptide
NSSNYCCETCCNPACTGCY

SEQ ID NO: 61 - protein, 19 aa, Artificial Sequence
  Synthetically generated peptide
NSSNYCCEWCCNPACTGCY

SEQ ID NO: 62 - protein, 19 aa, Artificial Sequence
  Synthetically generated peptide
NSSNYCCEVCCNPACTGCY

SEQ ID NO: 63 - protein, 14 aa, Artificial Sequence
  Synthetically generated peptide
CCEACCNPACTGCY

SEQ ID NO: 64 - protein, 14 aa, Artificial Sequence
  Synthetically generated peptide
CCERCCNPACTGCY

SEQ ID NO: 65 - protein, 14 aa, Artificial Sequence
  Synthetically generated peptide
CCENCCNPACTGCY

SEQ ID NO: 66 - protein, 14 aa, Artificial Sequence
  Synthetically generated peptide
CCEDCCNPACTGCY

SEQ ID NO: 67 - protein, 14 aa, Artificial Sequence
  Synthetically generated peptide
CCECCCNPACTGCY

SEQ ID NO: 68 - protein, 14 aa, Artificial Sequence
  Synthetically generated peptide
CCEQCCNPACTGCY

SEQ ID NO: 69 - protein, 14 aa, Artificial Sequence
  Synthetically generated peptide
CCEECCNPACTGCY

SEQ ID NO: 70 - protein, 14 aa, Artificial Sequence
  Synthetically generated peptide
CCEGCCNPACTGCY

SEQ ID NO: 71 - protein, 14 aa, Artificial Sequence
  Synthetically generated peptide
CCEHCCNPACTGCY

SEQ ID NO: 72 - protein, 14 aa, Artificial Sequence
  Synthetically generated peptide
CCEICCNPACTGCY

SEQ ID NO: 73 - protein, 14 aa, Artificial Sequence
  Synthetically generated peptide
CCEKCCNPACTGCY

SEQ ID NO: 74 - protein, 14 aa, Artificial Sequence
  Synthetically generated peptide
CCEMCCNPACTGCY

SEQ ID NO: 75 - protein, 14 aa, Artificial Sequence
  Synthetically generated peptide
CCEFCCNPACTGCY

SEQ ID NO: 76 - protein, 14 aa, Artificial Sequence
  Synthetically generated peptide
CCEPCCNPACTGCY

SEQ ID NO: 77 - protein, 14 aa, Artificial Sequence
  Synthetically generated peptide
CCESCCNPACTGCY

SEQ ID NO: 78 - protein, 14 aa, Artificial Sequence
  Synthetically generated peptide
CCETCCNPACTGCY

SEQ ID NO: 79 - protein, 14 aa, Artificial Sequence
  Synthetically generated peptide
CCEWCCNPACTGCY

SEQ ID NO: 80 - protein, 14 aa, Artificial Sequence
  Synthetically generated peptide
CCEVCCNPACTGCY

SEQ ID NO: 81 - protein, 13 aa, Artificial Sequence
  Synthetically generated peptide
CCEYCCNPACTGC

SEQ ID NO: 82 - protein, 13 aa, Artificial Sequence
  Synthetically generated peptide
CCEACCNPACTGC

SEQ ID NO: 83 - protein, 13 aa, Artificial Sequence
  Synthetically generated peptide
CCERCCNPACTGC

SEQ ID NO: 84 - protein, 13 aa, Artificial Sequence
  Synthetically generated peptide
CCENCCNPACTGC

SEQ ID NO: 85 - protein, 13 aa, Artificial Sequence
  Synthetically generated peptide
CCEDCCNPACTGC

SEQ ID NO: 86 - protein, 13 aa, Artificial Sequence
  Synthetically generated peptide
CCECCCNPACTGC

SEQ ID NO: 87 - protein, 13 aa, Artificial Sequence
  Synthetically generated peptide
CCEQCCNPACTGC

SEQ ID NO: 88 - protein, 13 aa, Artificial Sequence
  Synthetically generated peptide
CCEECCNPACTGC

SEQ ID NO: 89 - protein, 13 aa, Artificial Sequence
  Synthetically generated peptide
CCEGCCNPACTGC

SEQ ID NO: 90 - protein, 13 aa, Artificial Sequence
  Synthetically generated peptide
CCEHCCNPACTGC

SEQ ID NO: 91 - protein, 13 aa, Artificial Sequence
  Synthetically generated peptide
CCEICCNPACTGC

SEQ ID NO: 92 - protein, 13 aa, Artificial Sequence
  Synthetically generated peptide
CCEKCCNPACTGC

SEQ ID NO: 93 - protein, 13 aa, Artificial Sequence
  Synthetically generated peptide
CCEMCCNPACTGC

SEQ ID NO: 94 - protein, 13 aa, Artificial Sequence
  Synthetically generated peptide
CCEFCCNPACTGC

SEQ ID NO: 95 - protein, 13 aa, Artificial Sequence
  Synthetically generated peptide
CCEPCCNPACTGC

SEQ ID NO: 96 - protein, 13 aa, Artificial Sequence
  Synthetically generated peptide
CCESCCNPACTGC

SEQ ID NO: 97 - protein, 13 aa, Artificial Sequence
  Synthetically generated peptide
CCETCCNPACTGC

SEQ ID NO: 98 - protein, 13 aa, Artificial Sequence
  Synthetically generated peptide
CCEWCCNPACTGC

SEQ ID NO: 99 - protein, 13 aa, Artificial Sequence
  Synthetically generated peptide
CCEVCCNPACTGC

SEQ ID NO: 100 - protein, 19 aa, Escherichia coli
NSSNYCCELCCNPACTGCY

SEQ ID NO: 101 - protein, 18 aa, Escherichia coli
NTFYCCELCCNPACAGCY

SEQ ID NO: 102 - protein, 18 aa, Escherichia coli
NTFYCCELCCYPACAGCN

SEQ ID NO: 103 - protein, 18 aa, Citrobacter freundii
NTFYCCELCCNPACAGCY

SEQ ID NO: 104 - protein, 30 aa, Yersinia enterocolitica
QACDPPSPPAEVSSDWDCCDVCCNPACAGC

SEQ ID NO: 105 - protein, 30 aa, Yersinia enterocolitica
QACDPPLPPAEVSSDWDCCDVCCNPACAGC

SEQ ID NO: 106 - protein, 30 aa, Yersinia enterocolitica
KACDTQTPSPSEENDDWCCEVCCNPACAGC

SEQ ID NO: 107 - protein, 53 aa, Yersinia enterocolitica
QETASGQVGDVSSSTIATEVSEAECGTQSATTQGENDWDWCCELCCNPACFGC

SEQ ID NO: 108 - protein, 16 aa, Yersinia kristensenii
SDWCCEVCCNPACAGC

SEQ ID NO: 109 - protein, 17 aa, Vibrio cholerae
IDCCEICCNPACFGCLN

SEQ ID NO: 110 - protein, 17 aa, Vibrio mimicus
IDCCEICCNPACFGCLN

SEQ ID NO: 111 - protein, 18 aa, Escherichia coli
NTFYCCELCCNPACAPCY

SEQ ID NO: 112 - protein, 13 aa, Vibrio cholerae
IDCCEICCNPACF

SEQ ID NO: 113 - protein, 14 aa, Vibrio cholerae
IDCCEICCNPACFG

SEQ ID NO: 114 - protein, 17 aa, Vibrio mimicus
IDCCEICCNPACFGCLN

SEQ ID NO: 115 - protein, 17 aa, Vibrio mimicus
IDRCEICCNPACFGCLN

SEQ ID NO: 116 - protein, 16 aa, Yersinia enterocolitica
DWDCCDVCCNPACAGC

SEQ ID NO: 117 - protein, 16 aa, Yersinia enterocolitica
DWDCCDVCCNPACAGC

SEQ ID NO: 118 - protein, 17 aa, Yersinia enterocolitica
NDDWCCEVCCNPACAGC

SEQ ID NO: 119 - protein, 16 aa, Yersinia enterocolitica
WDWCCELCCNPACFGC

SEQ ID NO: 120 - protein, 30 aa, Yersinia enterocolitica
QACDPPSPPAEVSSDWDCCDVCCDPACAGC

SEQ ID NO: 121 - protein, 72 aa, Escherichia coli
MKKLMLAIFISVLSFPSFSQSTESLDSSKEKITLETKKCDVVKNNSEKKSENMNNTFYCCELCCNPACAGCY

SEQ ID NO: 122 - protein, 72 aa, Escherichia coli
MKKSILFIFLSVLSFSPFAQDAKPVESSKEKITLESKKCNIAKKSNKSGPESMNSSNYCCELCCNPACTGCY

SEQ ID NO: 123 - protein, 71 aa, Yersinia enterocolitica
MKKIVFVLVLMLSSFGAFGQETVSGQFSDALSTPITAEVYKQACDPPLPPAEVSSDWDCCDVCCNPACAGC

SEQ ID NO: 124 - protein, 53 aa, Artificial Sequence
  Synthetically generated peptide
MKKSILFIFLSVLSFSPFAQDAKPAGSSKEKITLESKKCNIVKKSNKSGPESM

SEQ ID NO: 125 - protein, 53 aa, Escherichia coli
MKKSILFIFLSVLSFSPFAQDAKPAGSSKEKITLESKKCNIVKKNNESSPESM

SEQ ID NO: 126 - protein, 5 aa, Artificial Sequence
  Synthetically generated peptide
NSSNY

SEQ ID NO: 127 - protein, 6 aa, Artificial Sequence
  Synthetically generated peptide
KKKKKK

SEQ ID NO: 128 - protein, 7 aa, Artificial Sequence
  Synthetically generated peptide
DKKKKKK

SEQ ID NO: 129 - protein, 65 aa, Artificial Sequence
  Synthetically generated peptide
  VARIANT 2, 3, 4,5,  7, 8, 9, 10, , 12, 13, 14, 15, 17, 18, 19, 20, 22, 23, 24,25, 27, 28, 29, 30, 32, 33, 34, 35, 37, 38, 39, 40, 42, 43, 44, 45,47, 48, 49, 50, 52, 53, 54, 55, 57, 58, 59, 60, 62, 63, 64, 65: Xaa = any amino acid (natural or non-natural), the same or diferent
  VARIANT (1)...(65): Xaa = Any Amino Acid
CXXXXEXXXXYXXXXCXXXXCXXXXNXXXXPXXXXAXXXXCXXXXTXXXXGXXXXCXXXXYXXXX

SEQ ID NO: 130 - protein, 13 aa, Artificial Sequence
  Synthetically generated peptide
CCYCCNPACTGCY

SEQ ID NO: 131 - protein, 12 aa, Artificial Sequence
  Synthetically generated peptide
CCCCNPACTGCY

SEQ ID NO: 132 - protein, 11 aa, Artificial Sequence
  Synthetically generated peptide
CCCCPACTGCY

SEQ ID NO: 133 - protein, 10 aa, Artificial Sequence
  Synthetically generated peptide
CCCCACTGCY

SEQ ID NO: 134 - protein, 10 aa, Artificial Sequence
  Synthetically generated peptide
CCCCPCTGCY

SEQ ID NO: 135 - protein, 10 aa, Artificial Sequence
  Synthetically generated peptide
CCCCPACGCY

SEQ ID NO: 136 - protein, 10 aa, Artificial Sequence
  Synthetically generated peptide
CCCCPACTCY

SEQ ID NO: 137 - protein, 10 aa, Artificial Sequence
  Synthetically generated peptide
CCCCPACTGC

SEQ ID NO: 138 - protein, 11 aa, Artificial Sequence
  Synthetically generated peptide
CCCCNACTGCY

SEQ ID NO: 139 - protein, 10 aa, Artificial Sequence
  Synthetically generated peptide
CCCCNCTGCY

SEQ ID NO: 140 - protein, 10 aa, Artificial Sequence
  Synthetically generated peptide
CCCCNACGCY

SEQ ID NO: 141 - protein, 10 aa, Artificial Sequence
  Synthetically generated peptide
CCCCNACTCY

SEQ ID NO: 142 - protein, 10 aa, Artificial Sequence
  Synthetically generated peptide
CCCCNACTGC

SEQ ID NO: 143 - protein, 11 aa, Artificial Sequence
  Synthetically generated peptide
CCCCNPCTGCY

SEQ ID NO: 144 - protein, 10 aa, Artificial Sequence
  Synthetically generated peptide
CCCCNPCGCY

SEQ ID NO: 145 - protein, 10 aa, Artificial Sequence
  Synthetically generated peptide
CCCCNPCTCY

SEQ ID NO: 146 - protein, 10 aa, Artificial Sequence
  Synthetically generated peptide
CCCCNPCTGC

SEQ ID NO: 147 - protein, 11 aa, Artificial Sequence
  Synthetically generated peptide
CCCCNPACGCY

SEQ ID NO: 148 - protein, 10 aa, Artificial Sequence
  Synthetically generated peptide
CCCCNPACCY

SEQ ID NO: 149 - protein, 10 aa, Artificial Sequence
  Synthetically generated peptide
CCCCNPACGC

SEQ ID NO: 150 - protein, 11 aa, Artificial Sequence
  Synthetically generated peptide
CCCCNPACTCY

SEQ ID NO: 151 - protein, 10 aa, Artificial Sequence
  Synthetically generated peptide
CCCCNPACTC

SEQ ID NO: 152 - protein, 11 aa, Artificial Sequence
  Synthetically generated peptide
CCCCNPACTGC

SEQ ID NO: 153 - protein, 12 aa, Artificial Sequence
  Synthetically generated peptide
CCYCCPACTGCY

SEQ ID NO: 154 - protein, 11 aa, Artificial Sequence
  Synthetically generated peptide
CCYCCACTGCY

SEQ ID NO: 155 - protein, 10 aa, Artificial Sequence
  Synthetically generated peptide
CCYCCCTGCY

SEQ ID NO: 156 - protein, 10 aa, Artificial Sequence
  Synthetically generated peptide
CCYCCACGCY

SEQ ID NO: 157 - protein, 10 aa, Artificial Sequence
  Synthetically generated peptide
CCYCCACTCY

SEQ ID NO: 158 - protein, 10 aa, Artificial Sequence
  Synthetically generated peptide
CCYCCACTGC

SEQ ID NO: 159 - protein, 11 aa, Artificial Sequence
  Synthetically generated peptide
CCYCCPCTGCY

SEQ ID NO: 160 - protein, 10 aa, Artificial Sequence
  Synthetically generated peptide
CCYCCPCGCY

SEQ ID NO: 161 - protein, 10 aa, Artificial Sequence
  Synthetically generated peptide
CCYCCPCTCY

SEQ ID NO: 162 - protein, 10 aa, Artificial Sequence
  Synthetically generated peptide
CCYCCPCTGC

SEQ ID NO: 163 - protein, 11 aa, Artificial Sequence
  Synthetically generated peptide
CCYCCPACGCY

SEQ ID NO: 164 - protein, 10 aa, Artificial Sequence
  Synthetically generated peptide
CCYCCPACCY

SEQ ID NO: 165 - protein, 10 aa, Artificial Sequence
  Synthetically generated peptide
CCYCCPACGC

SEQ ID NO: 166 - protein, 11 aa, Artificial Sequence
  Synthetically generated peptide
CCYCCPACTCY

SEQ ID NO: 167 - protein, 10 aa, Artificial Sequence
  Synthetically generated peptide
CCYCCPACTC

SEQ ID NO: 168 - protein, 11 aa, Artificial Sequence
  Synthetically generated peptide
CCYCCPACTGC

SEQ ID NO: 169 - protein, 12 aa, Artificial Sequence
  Synthetically generated peptide
CCYCCNACTGCY

SEQ ID NO: 170 - protein, 11 aa, Artificial Sequence
  Synthetically generated peptide
CCYCCNCTGCY

SEQ ID NO: 171 - protein, 10 aa, Artificial Sequence
  Synthetically generated peptide
CCYCCNCGCY

SEQ ID NO: 172 - protein, 10 aa, Artificial Sequence
  Synthetically generated peptide
CCYCCNCTCY

SEQ ID NO: 173 - protein, 10 aa, Artificial Sequence
  Synthetically generated peptide
CCYCCNCTGC

SEQ ID NO: 174 - protein, 11 aa, Artificial Sequence
  Synthetically generated peptide
CCYCCNACGCY

SEQ ID NO: 175 - protein, 10 aa, Artificial Sequence
  Synthetically generated peptide
CCYCCNACCY

SEQ ID NO: 176 - protein, 10 aa, Artificial Sequence
  Synthetically generated peptide
CCYCCNACGC

SEQ ID NO: 177 - protein, 11 aa, Artificial Sequence
  Synthetically generated peptide
CCYCCNACTCY

SEQ ID NO: 178 - protein, 10 aa, Artificial Sequence
  Synthetically generated peptide
CCYCCNACTC

SEQ ID NO: 179 - protein, 11 aa, Artificial Sequence
  Synthetically generated peptide
CCYCCNACTGC

SEQ ID NO: 180 - protein, 12 aa, Artificial Sequence
  Synthetically generated peptide
CCYCCNPCTGCY

SEQ ID NO: 181 - protein, 11 aa, Artificial Sequence
  Synthetically generated peptide
CCYCCNPCGCY

SEQ ID NO: 182 - protein, 10 aa, Artificial Sequence
  Synthetically generated peptide
CCYCCNPCCY

SEQ ID NO: 183 - protein, 10 aa, Artificial Sequence
  Synthetically generated peptide
CCYCCNPCGC

SEQ ID NO: 184 - protein, 11 aa, Artificial Sequence
  Synthetically generated peptide
CCYCCNPCTCY

SEQ ID NO: 185 - protein, 10 aa, Artificial Sequence
  Synthetically generated peptide
CCYCCNPCTC

SEQ ID NO: 186 - protein, 11 aa, Artificial Sequence
  Synthetically generated peptide
CCYCCNPCTGC

SEQ ID NO: 187 - protein, 12 aa, Artificial Sequence
  Synthetically generated peptide
CCYCCNPACGCY

SEQ ID NO: 188 - protein, 11 aa, Artificial Sequence
  Synthetically generated peptide
CCYCCNPACCY

SEQ ID NO: 189 - protein, 10 aa, Artificial Sequence
  Synthetically generated peptide
CCYCCNPACC

SEQ ID NO: 190 - protein, 11 aa, Artificial Sequence
  Synthetically generated peptide
CCYCCNPACGC

SEQ ID NO: 191 - protein, 12 aa, Artificial Sequence
  Synthetically generated peptide
CCYCCNPACTCY

SEQ ID NO: 192 - protein, 11 aa, Artificial Sequence
  Synthetically generated peptide
CCYCCNPACTC

SEQ ID NO: 193 - protein, 12 aa, Artificial Sequence
  Synthetically generated peptide
CCYCCNPACTGC

SEQ ID NO: 194 - protein, 13 aa, Artificial Sequence
  Synthetically generated peptide
CCECCNPACTGCY

SEQ ID NO: 195 - protein, 12 aa, Artificial Sequence
  Synthetically generated peptide
CCECCPACTGCY

SEQ ID NO: 196 - protein, 11 aa, Artificial Sequence
  Synthetically generated peptide
CCECCACTGCY

SEQ ID NO: 197 - protein, 10 aa, Artificial Sequence
  Synthetically generated peptide
CCECCCTGCY

SEQ ID NO: 198 - protein, 10 aa, Artificial Sequence
  Synthetically generated peptide
CCECCACGCY

SEQ ID NO: 199 - protein, 10 aa, Artificial Sequence
  Synthetically generated peptide
CCECCACTCY

SEQ ID NO: 200 - protein, 10 aa, Artificial Sequence
  Synthetically generated peptide
CCECCACTGC

SEQ ID NO: 201 - protein, 11 aa, Artificial Sequence
  Synthetically generated peptide
CCECCPCTGCY

SEQ ID NO: 202 - protein, 10 aa, Artificial Sequence
  Synthetically generated peptide
CCECCPCGCY

SEQ ID NO: 203 - protein, 10 aa, Artificial Sequence
  Synthetically generated peptide
CCECCPCTCY

SEQ ID NO: 204 - protein, 10 aa, Artificial Sequence
  Synthetically generated peptide
CCECCPCTGC

SEQ ID NO: 205 - protein, 11 aa, Artificial Sequence
  Synthetically generated peptide
CCECCPACGCY

SEQ ID NO: 206 - protein, 10 aa, Artificial Sequence
  Synthetically generated peptide
CCECCPACCY

SEQ ID NO: 207 - protein, 10 aa, Artificial Sequence
  Synthetically generated peptide
CCECCPACGC

SEQ ID NO: 208 - protein, 11 aa, Artificial Sequence
  Synthetically generated peptide
CCECCPACTCY

SEQ ID NO: 209 - protein, 10 aa, Artificial Sequence
  Synthetically generated peptide
CCECCPACTC

SEQ ID NO: 210 - protein, 11 aa, Artificial Sequence
  Synthetically generated peptide
CCECCPACTGC

SEQ ID NO: 211 - protein, 12 aa, Artificial Sequence
  Synthetically generated peptide
CCECCNACTGCY

SEQ ID NO: 212 - protein, 11 aa, Artificial Sequence
  Synthetically generated peptide
CCECCNCTGCY

SEQ ID NO: 213 - protein, 10 aa, Artificial Sequence
  Synthetically generated peptide
CCECCNCGCY

SEQ ID NO: 214 - protein, 10 aa, Artificial Sequence
  Synthetically generated peptide
CCECCNCTCY

SEQ ID NO: 215 - protein, 10 aa, Artificial Sequence
  Synthetically generated peptide
CCECCNCTGC

SEQ ID NO: 216 - protein, 11 aa, Artificial Sequence
  Synthetically generated peptide
CCECCNACGCY

SEQ ID NO: 217 - protein, 10 aa, Artificial Sequence
  Synthetically generated peptide
CCECCNACCY

SEQ ID NO: 218 - protein, 10 aa, Artificial Sequence
  Synthetically generated peptide
CCECCNACGC

SEQ ID NO: 219 - protein, 11 aa, Artificial Sequence
  Synthetically generated peptide
CCECCNACTCY

SEQ ID NO: 220 - protein, 10 aa, Artificial Sequence
  Synthetically generated peptide
CCECCNACTC

SEQ ID NO: 221 - protein, 11 aa, Artificial Sequence
  Synthetically generated peptide
CCECCNACTGC

SEQ ID NO: 222 - protein, 12 aa, Artificial Sequence
  Synthetically generated peptide
CCECCNPCTGCY

SEQ ID NO: 223 - protein, 11 aa, Artificial Sequence
  Synthetically generated peptide
CCECCNPCGCY

SEQ ID NO: 224 - protein, 10 aa, Artificial Sequence
  Synthetically generated peptide
CCECCNPCCY

SEQ ID NO: 225 - protein, 10 aa, Artificial Sequence
  Synthetically generated peptide
CCECCNPCGC

SEQ ID NO: 226 - protein, 11 aa, Artificial Sequence
  Synthetically generated peptide
CCECCNPCTCY

SEQ ID NO: 227 - protein, 10 aa, Artificial Sequence
  Synthetically generated peptide
CCECCNPCTC

SEQ ID NO: 228 - protein, 11 aa, Artificial Sequence
  Synthetically generated peptide
CCECCNPCTGC

SEQ ID NO: 229 - protein, 12 aa, Artificial Sequence
  Synthetically generated peptide
CCECCNPACGCY

SEQ ID NO: 230 - protein, 11 aa, Artificial Sequence
  Synthetically generated peptide
CCECCNPACCY

SEQ ID NO: 231 - protein, 10 aa, Artificial Sequence
  Synthetically generated peptide
CCECCNPACC

SEQ ID NO: 232 - protein, 11 aa, Artificial Sequence
  Synthetically generated peptide
CCECCNPACGC

SEQ ID NO: 233 - protein, 12 aa, Artificial Sequence
  Synthetically generated peptide
CCECCNPACTCY

SEQ ID NO: 234 - protein, 11 aa, Artificial Sequence
  Synthetically generated peptide
CCECCNPACTC

SEQ ID NO: 235 - protein, 12 aa, Artificial Sequence
  Synthetically generated peptide
CCECCNPACTGC

SEQ ID NO: 236 - protein, 13 aa, Artificial Sequence
  Synthetically generated peptide
CCEYCCPACTGCY

SEQ ID NO: 237 - protein, 12 aa, Artificial Sequence
  Synthetically generated peptide
CCEYCCACTGCY

SEQ ID NO: 238 - protein, 11 aa, Artificial Sequence
  Synthetically generated peptide
CCEYCCCTGCY

SEQ ID NO: 239 - protein, 10 aa, Artificial Sequence
  Synthetically generated peptide
CCEYCCCGCY

SEQ ID NO: 240 - protein, 10 aa, Artificial Sequence
  Synthetically generated peptide
CCEYCCCTCY

SEQ ID NO: 241 - protein, 10 aa, Artificial Sequence
  Synthetically generated peptide
CCEYCCCTGC

SEQ ID NO: 242 - protein, 11 aa, Artificial Sequence
  Synthetically generated peptide
CCEYCCACGCY

SEQ ID NO: 243 - protein, 10 aa, Artificial Sequence
  Synthetically generated peptide
CCEYCCACCY

SEQ ID NO: 244 - protein, 10 aa, Artificial Sequence
  Synthetically generated peptide
CCEYCCACGC

SEQ ID NO: 245 - protein, 11 aa, Artificial Sequence
  Synthetically generated peptide
CCEYCCACTCY

SEQ ID NO: 246 - protein, 10 aa, Artificial Sequence
  Synthetically generated peptide
CCEYCCACTC

SEQ ID NO: 247 - protein, 11 aa, Artificial Sequence
  Synthetically generated peptide
CCEYCCACTGC

SEQ ID NO: 248 - protein, 12 aa, Artificial Sequence
  Synthetically generated peptide
CCEYCCPCTGCY

SEQ ID NO: 249 - protein, 11 aa, Artificial Sequence
  Synthetically generated peptide
CCEYCCPCGCY

SEQ ID NO: 250 - protein, 10 aa, Artificial Sequence
  Synthetically generated peptide
CCEYCCPCCY

SEQ ID NO: 251 - protein, 10 aa, Artificial Sequence
  Synthetically generated peptide
CCEYCCPCGC

SEQ ID NO: 252 - protein, 11 aa, Artificial Sequence
  Synthetically generated peptide
CCEYCCPCTCY

SEQ ID NO: 253 - protein, 10 aa, Artificial Sequence
  Synthetically generated peptide
CCEYCCPCTC

SEQ ID NO: 254 - protein, 11 aa, Artificial Sequence
  Synthetically generated peptide
CCEYCCPCTGC

SEQ ID NO: 255 - protein, 12 aa, Artificial Sequence
  Synthetically generated peptide
CCEYCCPACGCY

SEQ ID NO: 256 - protein, 11 aa, Artificial Sequence
  Synthetically generated peptide
CCEYCCPACCY

SEQ ID NO: 257 - protein, 10 aa, Artificial Sequence
  Synthetically generated peptide
CCEYCCPACC

SEQ ID NO: 258 - protein, 11 aa, Artificial Sequence
  Synthetically generated peptide
CCEYCCPACGC

SEQ ID NO: 259 - protein, 12 aa, Artificial Sequence
  Synthetically generated peptide
CCEYCCPACTCY

SEQ ID NO: 260 - protein, 11 aa, Artificial Sequence
  Synthetically generated peptide
CCEYCCPACTC

SEQ ID NO: 261 - protein, 12 aa, Artificial Sequence
  Synthetically generated peptide
CCEYCCPACTGC

SEQ ID NO: 262 - protein, 13 aa, Artificial Sequence
  Synthetically generated peptide
CCEYCCNACTGCY

SEQ ID NO: 263 - protein, 12 aa, Artificial Sequence
  Synthetically generated peptide
CCEYCCNCTGCY

SEQ ID NO: 264 - protein, 11 aa, Artificial Sequence
  Synthetically generated peptide
CCEYCCNCGCY

SEQ ID NO: 265 - protein, 10 aa, Artificial Sequence
  Synthetically generated peptide
CCEYCCNCCY

SEQ ID NO: 266 - protein, 10 aa, Artificial Sequence
  Synthetically generated peptide
CCEYCCNCGC

SEQ ID NO: 267 - protein, 11 aa, Artificial Sequence
  Synthetically generated peptide
CCEYCCNCTCY

SEQ ID NO: 268 - protein, 10 aa, Artificial Sequence
  Synthetically generated peptide
CCEYCCNCTC

SEQ ID NO: 269 - protein, 11 aa, Artificial Sequence
  Synthetically generated peptide
CCEYCCNCTGC

SEQ ID NO: 270 - protein, 12 aa, Artificial Sequence
  Synthetically generated peptide
CCEYCCNACGCY

SEQ ID NO: 271 - protein, 11 aa, Artificial Sequence
  Synthetically generated peptide
CCEYCCNACCY

SEQ ID NO: 272 - protein, 10 aa, Artificial Sequence
  Synthetically generated peptide
CCEYCCNACC

SEQ ID NO: 273 - protein, 11 aa, Artificial Sequence
  Synthetically generated peptide
CCEYCCNACGC

SEQ ID NO: 274 - protein, 12 aa, Artificial Sequence
  Synthetically generated peptide
CCEYCCNACTCY

SEQ ID NO: 275 - protein, 11 aa, Artificial Sequence
  Synthetically generated peptide
CCEYCCNACTC

SEQ ID NO: 276 - protein, 12 aa, Artificial Sequence
  Synthetically generated peptide
CCEYCCNACTGC

SEQ ID NO: 277 - protein, 13 aa, Artificial Sequence
  Synthetically generated peptide
CCEYCCNPCTGCY

SEQ ID NO: 278 - protein, 12 aa, Artificial Sequence
  Synthetically generated peptide
CCEYCCNPCGCY

SEQ ID NO: 279 - protein, 11 aa, Artificial Sequence
  Synthetically generated peptide
CCEYCCNPCCY

SEQ ID NO: 280 - protein, 10 aa, Artificial Sequence
  Synthetically generated peptide
CCEYCCNPCC

SEQ ID NO: 281 - protein, 11 aa, Artificial Sequence
  Synthetically generated peptide
CCEYCCNPCGC

SEQ ID NO: 282 - protein, 12 aa, Artificial Sequence
  Synthetically generated peptide
CCEYCCNPCTCY

SEQ ID NO: 283 - protein, 11 aa, Artificial Sequence
  Synthetically generated peptide
CCEYCCNPCTC

SEQ ID NO: 284 - protein, 12 aa, Artificial Sequence
  Synthetically generated peptide
CCEYCCNPCTGC

SEQ ID NO: 285 - protein, 13 aa, Artificial Sequence
  Synthetically generated peptide
CCEYCCNPACGCY

SEQ ID NO: 286 - protein, 12 aa, Artificial Sequence
  Synthetically generated peptide
CCEYCCNPACCY

SEQ ID NO: 287 - protein, 11 aa, Artificial Sequence
  Synthetically generated peptide
CCEYCCNPACC

SEQ ID NO: 288 - protein, 12 aa, Artificial Sequence
  Synthetically generated peptide
CCEYCCNPACGC

SEQ ID NO: 289 - protein, 13 aa, Artificial Sequence
  Synthetically generated peptide
CCEYCCNPACTCY

SEQ ID NO: 290 - protein, 12 aa, Artificial Sequence
  Synthetically generated peptide
CCEYCCNPACTC

SEQ ID NO: 291 - protein, 13 aa, Artificial Sequence
  Synthetically generated peptide
CCEYCCNPACTGC

SEQ ID NO: 292 - protein, 13 aa, Artificial Sequence
  Synthetically generated peptide
  VARIANT (1)...(13): Xaa = Any Amino Acid
XEYCCNPACTGCY

SEQ ID NO: 293 - protein, 16 aa, Artificial Sequence
  Synthetically generated peptide
  VARIANT (1)...(16): Xaa = Any Amino Acid
CCXXEYCCNPACTGCY

SEQ ID NO: 294 - protein, 17 aa, Artificial Sequence
  Synthetically generated peptide
  VARIANT (1)...(17): Xaa = Any Amino Acid
CCXXXEYCCNPACTGCY

SEQ ID NO: 295 - protein, 18 aa, Artificial Sequence
  Synthetically generated peptide
  VARIANT (1)...(18): Xaa = Any Amino Acid
CCXXXXEYCCNPACTGCY

SEQ ID NO: 296 - protein, 18 aa, Artificial Sequence
  Synthetically generated peptide
  VARIANT (1)...(18): Xaa = Any Amino Acid
CCXXXEXYCCNPACTGCY

SEQ ID NO: 297 - protein, 18 aa, Artificial Sequence
  Synthetically generated peptide
  VARIANT (1)...(18): Xaa = Any Amino Acid
CCXXXEYXCCNPACTGCY

SEQ ID NO: 298 - protein, 18 aa, Artificial Sequence
  Synthetically generated peptide
  VARIANT (1)...(18): Xaa = Any Amino Acid
CCXXXEYCCXNPACTGCY

SEQ ID NO: 299 - protein, 18 aa, Artificial Sequence
  Synthetically generated peptide
  VARIANT (1)...(18): Xaa = Any Amino Acid
CCXXXEYCCNXPACTGCY

SEQ ID NO: 300 - protein, 18 aa, Artificial Sequence
  Synthetically generated peptide
  VARIANT (1)...(18): Xaa = Any Amino Acid
CCXXXEYCCNPXACTGCY

SEQ ID NO: 301 - protein, 18 aa, Artificial Sequence
  Synthetically generated peptide
  VARIANT (1)...(18): Xaa = Any Amino Acid
CCXXXEYCCNPAXCTGCY

SEQ ID NO: 302 - protein, 18 aa, Artificial Sequence
  Synthetically generated peptide
  VARIANT (1)...(18): Xaa = Any Amino Acid
CCXXXEYCCNPACXTGCY

SEQ ID NO: 303 - protein, 18 aa, Artificial Sequence
  Synthetically generated peptide
  VARIANT (1)...(18): Xaa = Any Amino Acid
CCXXXEYCCNPACTXGCY

SEQ ID NO: 304 - protein, 18 aa, Artificial Sequence
  Synthetically generated peptide
  VARIANT (1)...(18): Xaa = Any Amino Acid
CCXXXEYCCNPACTGXCY

SEQ ID NO: 305 - protein, 18 aa, Artificial Sequence
  Synthetically generated peptide
  VARIANT (1)...(18): Xaa = Any Amino Acid
CCXXXEYCCNPACTGCXY

SEQ ID NO: 306 - protein, 17 aa, Artificial Sequence
  Synthetically generated peptide
  VARIANT (1)...(17): Xaa = Any Amino Acid
CCXXEXYCCNPACTGCY

SEQ ID NO: 307 - protein, 18 aa, Artificial Sequence
  Synthetically generated peptide
  VARIANT (1)...(18): Xaa = Any Amino Acid
CCXXEXXYCCNPACTGCY

SEQ ID NO: 308 - protein, 18 aa, Artificial Sequence
  Synthetically generated peptide
  VARIANT (1)...(18): Xaa = Any Amino Acid
CCXXEXYXCCNPACTGCY

SEQ ID NO: 309 - protein, 18 aa, Artificial Sequence
  Synthetically generated peptide
  VARIANT (1)...(18): Xaa = Any Amino Acid
CCXXEXYCCXNPACTGCY

SEQ ID NO: 310 - protein, 18 aa, Artificial Sequence
  Synthetically generated peptide
  VARIANT (1)...(18): Xaa = Any Amino Acid
CCXXEXYCCNXPACTGCY

SEQ ID NO: 311 - protein, 18 aa, Artificial Sequence
  Synthetically generated peptide
  VARIANT (1)...(18): Xaa = Any Amino Acid
CCXXEXYCCNPXACTGCY

SEQ ID NO: 312 - protein, 18 aa, Artificial Sequence
  Synthetically generated peptide
  VARIANT (1)...(18): Xaa = Any Amino Acid
CCXXEXYCCNPAXCTGCY

SEQ ID NO: 313 - protein, 18 aa, Artificial Sequence
  Synthetically generated peptide
  VARIANT (1)...(18): Xaa = Any Amino Acid
CCXXEXYCCNPACXTGCY

SEQ ID NO: 314 - protein, 18 aa, Artificial Sequence
  Synthetically generated peptide
  VARIANT (1)...(18): Xaa = Any Amino Acid
CCXXEXYCCNPACTXGCY

SEQ ID NO: 315 - protein, 18 aa, Artificial Sequence
  Synthetically generated peptide
  VARIANT (1)...(18): Xaa = Any Amino Acid
CCXXEXYCCNPACTGXCY

SEQ ID NO: 316 - protein, 18 aa, Artificial Sequence
  Synthetically generated peptide
  VARIANT (1)...(18): Xaa = Any Amino Acid
CCXXEXYCCNPACTGCXY

SEQ ID NO: 317 - protein, 17 aa, Artificial Sequence
  Synthetically generated peptide
  VARIANT (1)...(17): Xaa = Any Amino Acid
CCXXEYXCCNPACTGCY

SEQ ID NO: 318 - protein, 18 aa, Artificial Sequence
  Synthetically generated peptide
  VARIANT (1)...(18): Xaa = Any Amino Acid
CCXXEYXXCCNPACTGCY

SEQ ID NO: 319 - protein, 18 aa, Artificial Sequence
  Synthetically generated peptide
  VARIANT (1)...(18): Xaa = Any Amino Acid
CCXXEYXCCXNPACTGCY

SEQ ID NO: 320 - protein, 18 aa, Artificial Sequence
  Synthetically generated peptide
  VARIANT (1)...(18): Xaa = Any Amino Acid
CCXXEYXCCNXPACTGCY

SEQ ID NO: 321 - protein, 18 aa, Artificial Sequence
  Synthetically generated peptide
  VARIANT (1)...(18): Xaa = Any Amino Acid
CCXXEYXCCNPXACTGCY

SEQ ID NO: 322 - protein, 18 aa, Artificial Sequence
  Synthetically generated peptide
  VARIANT (1)...(18): Xaa = Any Amino Acid
CCXXEYXCCNPAXCTGCY

SEQ ID NO: 323 - protein, 18 aa, Artificial Sequence
  Synthetically generated peptide
  VARIANT (1)...(18): Xaa = Any Amino Acid
CCXXEYXCCNPACXTGCY

SEQ ID NO: 324 - protein, 18 aa, Artificial Sequence
  Synthetically generated peptide
  VARIANT (1)...(18): Xaa = Any Amino Acid
CCXXEYXCCNPACTXGCY

SEQ ID NO: 325 - protein, 18 aa, Artificial Sequence
  Synthetically generated peptide
  VARIANT (1)...(18): Xaa = Any Amino Acid
CCXXEYXCCNPACTGXCY

SEQ ID NO: 326 - protein, 18 aa, Artificial Sequence
  Synthetically generated peptide
  VARIANT (1)...(18): Xaa = Any Amino Acid
CCXXEYXCCNPACTGCXY

SEQ ID NO: 327 - protein, 17 aa, Artificial Sequence
  Synthetically generated peptide
  VARIANT (1)...(17): Xaa = Any Amino Acid
CCXXEYCCXNPACTGCY

SEQ ID NO: 328 - protein, 18 aa, Artificial Sequence
  Synthetically generated peptide
  VARIANT (1)...(18): Xaa = Any Amino Acid
CCXXEYCCXXNPACTGCY

SEQ ID NO: 329 - protein, 18 aa, Artificial Sequence
  Synthetically generated peptide
  VARIANT (1)...(18): Xaa = Any Amino Acid
CCXXEYCCXNXPACTGCY

SEQ ID NO: 330 - protein, 18 aa, Artificial Sequence
  Synthetically generated peptide
  VARIANT (1)...(18): Xaa = Any Amino Acid
CCXXEYCCXNPXACTGCY

SEQ ID NO: 331 - protein, 18 aa, Artificial Sequence
  Synthetically generated peptide
  VARIANT (1)...(18): Xaa = Any Amino Acid
CCXXEYCCXNPAXCTGCY

SEQ ID NO: 332 - protein, 18 aa, Artificial Sequence
  Synthetically generated peptide
  VARIANT (1)...(18): Xaa = Any Amino Acid
CCXXEYCCXNPACXTGCY

SEQ ID NO: 333 - protein, 18 aa, Artificial Sequence
  Synthetically generated peptide
  VARIANT (1)...(18): Xaa = Any Amino Acid
CCXXEYCCXNPACTXGCY

SEQ ID NO: 334 - protein, 18 aa, Artificial Sequence
  Synthetically generated peptide
  VARIANT (1)...(18): Xaa = Any Amino Acid
CCXXEYCCXNPACTGXCY

SEQ ID NO: 335 - protein, 18 aa, Artificial Sequence
  Synthetically generated peptide
  VARIANT (1)...(18): Xaa = Any Amino Acid
CCXXEYCCXNPACTGCXY

SEQ ID NO: 336 - protein, 17 aa, Artificial Sequence
  Synthetically generated peptide
  VARIANT (1)...(17): Xaa = Any Amino Acid
CCXXEYCCNXPACTGCY

SEQ ID NO: 337 - protein, 18 aa, Artificial Sequence
  Synthetically generated peptide
  VARIANT (1)...(18): Xaa = Any Amino Acid
CCXXEYCCNXXPACTGCY

SEQ ID NO: 338 - protein, 18 aa, Artificial Sequence
  Synthetically generated peptide
  VARIANT (1)...(18): Xaa = Any Amino Acid
CCXXEYCCNXPXACTGCY

SEQ ID NO: 339 - protein, 18 aa, Artificial Sequence
  Synthetically generated peptide
  VARIANT (1)...(18): Xaa = Any Amino Acid
CCXXEYCCNXPAXCTGCY

SEQ ID NO: 340 - protein, 18 aa, Artificial Sequence
  Synthetically generated peptide
  VARIANT (1)...(18): Xaa = Any Amino Acid
CCXXEYCCNXPACXTGCY

SEQ ID NO: 341 - protein, 18 aa, Artificial Sequence
  Synthetically generated peptide
  VARIANT (1)...(18): Xaa = Any Amino Acid
CCXXEYCCNXPACTXGCY

SEQ ID NO: 342 - protein, 18 aa, Artificial Sequence
  Synthetically generated peptide
  VARIANT (1)...(18): Xaa = Any Amino Acid
CCXXEYCCNXPACTGXCY

SEQ ID NO: 343 - protein, 18 aa, Artificial Sequence
  Synthetically generated peptide
  VARIANT (1)...(18): Xaa = Any Amino Acid
CCXXEYCCNXPACTGCXY

SEQ ID NO: 344 - protein, 17 aa, Artificial Sequence
  Synthetically generated peptide
  VARIANT (1)...(17): Xaa = Any Amino Acid
CCXXEYCCNPXACTGCY

SEQ ID NO: 345 - protein, 18 aa, Artificial Sequence
  Synthetically generated peptide
  VARIANT (1)...(18): Xaa = Any Amino Acid
CCXXEYCCNPXXACTGCY

SEQ ID NO: 346 - protein, 18 aa, Artificial Sequence
  Synthetically generated peptide
  VARIANT (1)...(18): Xaa = Any Amino Acid
CCXXEYCCNPXAXCTGCY

SEQ ID NO: 347 - protein, 18 aa, Artificial Sequence
  Synthetically generated peptide
  VARIANT (1)...(18): Xaa = Any Amino Acid
CCXXEYCCNPXACXTGCY

SEQ ID NO: 348 - protein, 18 aa, Artificial Sequence
  Synthetically generated peptide
  VARIANT (1)...(18): Xaa = Any Amino Acid
CCXXEYCCNPXACTXGCY

SEQ ID NO: 349 - protein, 18 aa, Artificial Sequence
  Synthetically generated peptide
  VARIANT (1)...(18): Xaa = Any Amino Acid
CCXXEYCCNPXACTGXCY

SEQ ID NO: 350 - protein, 18 aa, Artificial Sequence
  Synthetically generated peptide
  VARIANT (1)...(18): Xaa = Any Amino Acid
CCXXEYCCNPXACTGCXY

SEQ ID NO: 351 - protein, 17 aa, Artificial Sequence
  Synthetically generated peptide
  VARIANT (1)...(17): Xaa = Any Amino Acid
CCXXEYCCNPAXCTGCY

SEQ ID NO: 352 - protein, 18 aa, Artificial Sequence
  Synthetically generated peptide
  VARIANT (1)...(18): Xaa = Any Amino Acid
CCXXEYCCNPAXXCTGCY

SEQ ID NO: 353 - protein, 18 aa, Artificial Sequence
  Synthetically generated peptide
  VARIANT (1)...(18): Xaa = Any Amino Acid
CCXXEYCCNPAXCXTGCY

SEQ ID NO: 354 - protein, 18 aa, Artificial Sequence
  Synthetically generated peptide
  VARIANT (1)...(18): Xaa = Any Amino Acid
CCXXEYCCNPAXCTXGCY

SEQ ID NO: 355 - protein, 18 aa, Artificial Sequence
  Synthetically generated peptide
  VARIANT (1)...(18): Xaa = Any Amino Acid
CCXXEYCCNPAXCTGXCY

SEQ ID NO: 356 - protein, 18 aa, Artificial Sequence
  Synthetically generated peptide
  VARIANT (1)...(18): Xaa = Any Amino Acid
CCXXEYCCNPAXCTGCXY

SEQ ID NO: 357 - protein, 17 aa, Artificial Sequence
  Synthetically generated peptide
  VARIANT (1)...(17): Xaa = Any Amino Acid
CCXXEYCCNPACXTGCY

SEQ ID NO: 358 - protein, 18 aa, Artificial Sequence
  Synthetically generated peptide
  VARIANT (1)...(18): Xaa = Any Amino Acid
CCXXEYCCNPACXXTGCY

SEQ ID NO: 359 - protein, 18 aa, Artificial Sequence
  Synthetically generated peptide
  VARIANT (1)...(18): Xaa = Any Amino Acid
CCXXEYCCNPACXTXGCY

SEQ ID NO: 360 - protein, 18 aa, Artificial Sequence
  Synthetically generated peptide
  VARIANT (1)...(18): Xaa = Any Amino Acid
CCXXEYCCNPACXTGXCY

SEQ ID NO: 361 - protein, 18 aa, Artificial Sequence
  Synthetically generated peptide
  VARIANT (1)...(18): Xaa = Any Amino Acid
CCXXEYCCNPACXTGCXY

SEQ ID NO: 362 - protein, 17 aa, Artificial Sequence
  Synthetically generated peptide
  VARIANT (1)...(17): Xaa = Any Amino Acid
CCXXEYCCNPACTXGCY

SEQ ID NO: 363 - protein, 18 aa, Artificial Sequence
  Synthetically generated peptide
  VARIANT (1)...(18): Xaa = Any Amino Acid
CCXXEYCCNPACTXXGCY

SEQ ID NO: 364 - protein, 18 aa, Artificial Sequence
  Synthetically generated peptide
  VARIANT (1)...(18): Xaa = Any Amino Acid
CCXXEYCCNPACTXGXCY

SEQ ID NO: 365 - protein, 18 aa, Artificial Sequence
  Synthetically generated peptide
  VARIANT (1)...(18): Xaa = Any Amino Acid
CCXXEYCCNPACTXGCXY

SEQ ID NO: 366 - protein, 17 aa, Artificial Sequence
  Synthetically generated peptide
  VARIANT (1)...(17): Xaa = Any Amino Acid
CCXXEYCCNPACTGXCY

SEQ ID NO: 367 - protein, 18 aa, Artificial Sequence
  Synthetically generated peptide
  VARIANT (1)...(18): Xaa = Any Amino Acid
CCXXEYCCNPACTGXXCY

SEQ ID NO: 368 - protein, 18 aa, Artificial Sequence
  Synthetically generated peptide
  VARIANT (1)...(18): Xaa = Any Amino Acid
CCXXEYCCNPACTGXCXY

SEQ ID NO: 369 - protein, 17 aa, Artificial Sequence
  Synthetically generated peptide
  VARIANT (1)...(17): Xaa = Any Amino Acid
CCXXEYCCNPACTGCXY

SEQ ID NO: 370 - protein, 18 aa, Artificial Sequence
  Synthetically generated peptide
  VARIANT (1)...(18): Xaa = Any Amino Acid
CCXXEYCCNPACTGCXXY

SEQ ID NO: 371 - protein, 16 aa, Artificial Sequence
  Synthetically generated peptide
  VARIANT (1)...(16): Xaa = Any Amino Acid
CCXEXYCCNPACTGCY

SEQ ID NO: 372 - protein, 17 aa, Artificial Sequence
  Synthetically generated peptide
  VARIANT (1)...(17): Xaa = Any Amino Acid
CCXEXXYCCNPACTGCY

SEQ ID NO: 373 - protein, 18 aa, Artificial Sequence
  Synthetically generated peptide
  VARIANT (1)...(18): Xaa = Any Amino Acid
CCXEXXXYCCNPACTGCY

SEQ ID NO: 374 - protein, 18 aa, Artificial Sequence
  Synthetically generated peptide
  VARIANT (1)...(18): Xaa = Any Amino Acid
CCXEXXYXCCNPACTGCY

SEQ ID NO: 375 - protein, 18 aa, Artificial Sequence
  Synthetically generated peptide
  VARIANT (1)...(18): Xaa = Any Amino Acid
CCXEXXYCCXNPACTGCY

SEQ ID NO: 376 - protein, 18 aa, Artificial Sequence
  Synthetically generated peptide
  VARIANT (1)...(18): Xaa = Any Amino Acid
CCXEXXYCCNXPACTGCY

SEQ ID NO: 377 - protein, 18 aa, Artificial Sequence
  Synthetically generated peptide
  VARIANT (1)...(18): Xaa = Any Amino Acid
CCXEXXYCCNPXACTGCY

SEQ ID NO: 378 - protein, 18 aa, Artificial Sequence
  Synthetically generated peptide
  VARIANT (1)...(18): Xaa = Any Amino Acid
CCXEXXYCCNPAXCTGCY

SEQ ID NO: 379 - protein, 18 aa, Artificial Sequence
  Synthetically generated peptide
  VARIANT (1)...(18): Xaa = Any Amino Acid
CCXEXXYCCNPACXTGCY

SEQ ID NO: 380 - protein, 18 aa, Artificial Sequence
  Synthetically generated peptide
  VARIANT (1)...(18): Xaa = Any Amino Acid
CCXEXXYCCNPACTXGCY

SEQ ID NO: 381 - protein, 18 aa, Artificial Sequence
  Synthetically generated peptide
  VARIANT (1)...(18): Xaa = Any Amino Acid
CCXEXXYCCNPACTGXCY

SEQ ID NO: 382 - protein, 18 aa, Artificial Sequence
  Synthetically generated peptide
  VARIANT (1)...(18): Xaa = Any Amino Acid
CCXEXXYCCNPACTGCXY

SEQ ID NO: 383 - protein, 17 aa, Artificial Sequence
  Synthetically generated peptide
  VARIANT (1)...(17): Xaa = Any Amino Acid
CCXEXYXCCNPACTGCY

SEQ ID NO: 384 - protein, 18 aa, Artificial Sequence
  Synthetically generated peptide
  VARIANT (1)...(18): Xaa = Any Amino Acid
CCXEXYXXCCNPACTGCY

SEQ ID NO: 385 - protein, 18 aa, Artificial Sequence
  Synthetically generated peptide
  VARIANT (1)...(18): Xaa = Any Amino Acid
CCXEXYXCCXNPACTGCY

SEQ ID NO: 386 - protein, 18 aa, Artificial Sequence
  Synthetically generated peptide
  VARIANT (1)...(18): Xaa = Any Amino Acid
CCXEXYXCCNXPACTGCY

SEQ ID NO: 387 - protein, 18 aa, Artificial Sequence
  Synthetically generated peptide
  VARIANT (1)...(18): Xaa = Any Amino Acid
CCXEXYXCCNPXACTGCY

SEQ ID NO: 388 - protein, 18 aa, Artificial Sequence
  Synthetically generated peptide
  VARIANT (1)...(18): Xaa = Any Amino Acid
CCXEXYXCCNPAXCTGCY

SEQ ID NO: 389 - protein, 18 aa, Artificial Sequence
  Synthetically generated peptide
  VARIANT (1)...(18): Xaa = Any Amino Acid
CCXEXYXCCNPACXTGCY

SEQ ID NO: 390 - protein, 18 aa, Artificial Sequence
  Synthetically generated peptide
  VARIANT (1)...(18): Xaa = Any Amino Acid
CCXEXYXCCNPACTXGCY

SEQ ID NO: 391 - protein, 18 aa, Artificial Sequence
  Synthetically generated peptide
  VARIANT (1)...(18): Xaa = Any Amino Acid
CCXEXYXCCNPACTGXCY

SEQ ID NO: 392 - protein, 18 aa, Artificial Sequence
  Synthetically generated peptide
  VARIANT (1)...(18): Xaa = Any Amino Acid
CCXEXYXCCNPACTGCXY

SEQ ID NO: 393 - protein, 17 aa, Artificial Sequence
  Synthetically generated peptide
  VARIANT (1)...(17): Xaa = Any Amino Acid
CCXEXYCCXNPACTGCY

SEQ ID NO: 394 - protein, 18 aa, Artificial Sequence
  Synthetically generated peptide
  VARIANT (1)...(18): Xaa = Any Amino Acid
CCXEXYCCXXNPACTGCY

SEQ ID NO: 395 - protein, 18 aa, Artificial Sequence
  Synthetically generated peptide
  VARIANT (1)...(18): Xaa = Any Amino Acid
CCXEXYCCXNXPACTGCY

SEQ ID NO: 396 - protein, 18 aa, Artificial Sequence
  Synthetically generated peptide
  VARIANT (1)...(18): Xaa = Any Amino Acid
CCXEXYCCXNPXACTGCY

SEQ ID NO: 397 - protein, 18 aa, Artificial Sequence
  Synthetically generated peptide
  VARIANT (1)...(18): Xaa = Any Amino Acid
CCXEXYCCXNPAXCTGCY

SEQ ID NO: 398 - protein, 18 aa, Artificial Sequence
  Synthetically generated peptide
  VARIANT (1)...(18): Xaa = Any Amino Acid
CCXEXYCCXNPACXTGCY

SEQ ID NO: 399 - protein, 18 aa, Artificial Sequence
  Synthetically generated peptide
  VARIANT (1)...(18): Xaa = Any Amino Acid
CCXEXYCCXNPACTXGCY

SEQ ID NO: 400 - protein, 18 aa, Artificial Sequence
  Synthetically generated peptide
  VARIANT (1)...(18): Xaa = Any Amino Acid
CCXEXYCCXNPACTGXCY

SEQ ID NO: 401 - protein, 18 aa, Artificial Sequence
  Synthetically generated peptide
  VARIANT (1)...(18): Xaa = Any Amino Acid
CCXEXYCCXNPACTGCXY

SEQ ID NO: 402 - protein, 17 aa, Artificial Sequence
  Synthetically generated peptide
  VARIANT (1)...(17): Xaa = Any Amino Acid
CCXEXYCCNXPACTGCY

SEQ ID NO: 403 - protein, 18 aa, Artificial Sequence
  Synthetically generated peptide
  VARIANT (1)...(18): Xaa = Any Amino Acid
CCXEXYCCNXXPACTGCY

SEQ ID NO: 404 - protein, 18 aa, Artificial Sequence
  Synthetically generated peptide
  VARIANT (1)...(18): Xaa = Any Amino Acid
CCXEXYCCNXPXACTGCY

SEQ ID NO: 405 - protein, 18 aa, Artificial Sequence
  Synthetically generated peptide
  VARIANT (1)...(18): Xaa = Any Amino Acid
CCXEXYCCNXPAXCTGCY

SEQ ID NO: 406 - protein, 18 aa, Artificial Sequence
  Synthetically generated peptide
  VARIANT (1)...(18): Xaa = Any Amino Acid
CCXEXYCCNXPACXTGCY

SEQ ID NO: 407 - protein, 18 aa, Artificial Sequence
  Synthetically generated peptide
  VARIANT (1)...(18): Xaa = Any Amino Acid
CCXEXYCCNXPACTXGCY

SEQ ID NO: 408 - protein, 18 aa, Artificial Sequence
  Synthetically generated peptide
  VARIANT (1)...(18): Xaa = Any Amino Acid
CCXEXYCCNXPACTGXCY

SEQ ID NO: 409 - protein, 18 aa, Artificial Sequence
  Synthetically generated peptide
  VARIANT (1)...(18): Xaa = Any Amino Acid
CCXEXYCCNXPACTGCXY

SEQ ID NO: 410 - protein, 17 aa, Artificial Sequence
  Synthetically generated peptide
  VARIANT (1)...(17): Xaa = Any Amino Acid
CCXEXYCCNPXACTGCY

SEQ ID NO: 411 - protein, 18 aa, Artificial Sequence
  Synthetically generated peptide
  VARIANT (1)...(18): Xaa = Any Amino Acid
CCXEXYCCNPXXACTGCY

SEQ ID NO: 412 - protein, 18 aa, Artificial Sequence
  Synthetically generated peptide
  VARIANT (1)...(18): Xaa = Any Amino Acid
CCXEXYCCNPXAXCTGCY

SEQ ID NO: 413 - protein, 18 aa, Artificial Sequence
  Synthetically generated peptide
  VARIANT (1)...(18): Xaa = Any Amino Acid
CCXEXYCCNPXACXTGCY

SEQ ID NO: 414 - protein, 18 aa, Artificial Sequence
  Synthetically generated peptide
  VARIANT (1)...(18): Xaa = Any Amino Acid
CCXEXYCCNPXACTXGCY

SEQ ID NO: 415 - protein, 18 aa, Artificial Sequence
  Synthetically generated peptide
  VARIANT (1)...(18): Xaa = Any Amino Acid
CCXEXYCCNPXACTGXCY

SEQ ID NO: 416 - protein, 18 aa, Artificial Sequence
  Synthetically generated peptide
  VARIANT (1)...(18): Xaa = Any Amino Acid
CCXEXYCCNPXACTGCXY

SEQ ID NO: 417 - protein, 17 aa, Artificial Sequence
  Synthetically generated peptide
  VARIANT (1)...(17): Xaa = Any Amino Acid
CCXEXYCCNPAXCTGCY

SEQ ID NO: 418 - protein, 18 aa, Artificial Sequence
  Synthetically generated peptide
  VARIANT (1)...(18): Xaa = Any Amino Acid
CCXEXYCCNPAXXCTGCY

SEQ ID NO: 419 - protein, 18 aa, Artificial Sequence
  Synthetically generated peptide
  VARIANT (1)...(18): Xaa = Any Amino Acid
CCXEXYCCNPAXCXTGCY

SEQ ID NO: 420 - protein, 18 aa, Artificial Sequence
  Synthetically generated peptide
  VARIANT (1)...(18): Xaa = Any Amino Acid
CCXEXYCCNPAXCTXGCY

SEQ ID NO: 421 - protein, 18 aa, Artificial Sequence
  Synthetically generated peptide
  VARIANT (1)...(18): Xaa = Any Amino Acid
CCXEXYCCNPAXCTGXCY

SEQ ID NO: 422 - protein, 18 aa, Artificial Sequence
  Synthetically generated peptide
  VARIANT (1)...(18): Xaa = Any Amino Acid
CCXEXYCCNPAXCTGCXY

SEQ ID NO: 423 - protein, 17 aa, Artificial Sequence
  Synthetically generated peptide
  VARIANT (1)...(17): Xaa = Any Amino Acid
CCXEXYCCNPACXTGCY

SEQ ID NO: 424 - protein, 18 aa, Artificial Sequence
  Synthetically generated peptide
  VARIANT (1)...(18): Xaa = Any Amino Acid
CCXEXYCCNPACXXTGCY

SEQ ID NO: 425 - protein, 18 aa, Artificial Sequence
  Synthetically generated peptide
  VARIANT (1)...(18): Xaa = Any Amino Acid
  VARIANT (1)...(18): Xaa = Any Amino Acid
CCXEXYCCNPACXTXGCY

SEQ ID NO: 426 - protein, 18 aa, Artificial Sequence
  Synthetically generated peptide
  VARIANT (1)...(18): Xaa = Any Amino Acid
CCXEXYCCNPACXTGXCY

SEQ ID NO: 427 - protein, 18 aa, Artificial Sequence
  Synthetically generated peptide
  VARIANT (1)...(18): Xaa = Any Amino Acid
CCXEXYCCNPACXTGCXY

SEQ ID NO: 428 - protein, 17 aa, Artificial Sequence
  Synthetically generated peptide
  VARIANT (1)...(17): Xaa = Any Amino Acid
CCXEXYCCNPACTXGCY

SEQ ID NO: 429 - protein, 18 aa, Artificial Sequence
  Synthetically generated peptide
  VARIANT (1)...(18): Xaa = Any Amino Acid
CCXEXYCCNPACTXXGCY

SEQ ID NO: 430 - protein, 18 aa, Artificial Sequence
  Synthetically generated peptide
  VARIANT (1)...(18): Xaa = Any Amino Acid
CCXEXYCCNPACTXGXCY

SEQ ID NO: 431 - protein, 18 aa, Artificial Sequence
  Synthetically generated peptide
  VARIANT (1)...(18): Xaa = Any Amino Acid
CCXEXYCCNPACTXGCXY

SEQ ID NO: 432 - protein, 17 aa, Artificial Sequence
  Synthetically generated peptide
  VARIANT (1)...(17): Xaa = Any Amino Acid
CCXEXYCCNPACTGXCY

SEQ ID NO: 433 - protein, 18 aa, Artificial Sequence
  Synthetically generated peptide
  VARIANT (1)...(18): Xaa = Any Amino Acid
CCXEXYCCNPACTGXXCY

SEQ ID NO: 434 - protein, 18 aa, Artificial Sequence
  Synthetically generated peptide
  VARIANT (1)...(18): Xaa = Any Amino Acid
CCXEXYCCNPACTGXCXY

SEQ ID NO: 435 - protein, 17 aa, Artificial Sequence
  Synthetically generated peptide
  VARIANT (1)...(17): Xaa = Any Amino Acid
CCXEXYCCNPACTGCXY

SEQ ID NO: 436 - protein, 18 aa, Artificial Sequence
  Synthetically generated peptide
  VARIANT (1)...(18): Xaa = Any Amino Acid
CCXEXYCCNPACTGCXXY

SEQ ID NO: 437 - protein, 16 aa, Artificial Sequence
  Synthetically generated peptide
  VARIANT (1)...(16): Xaa = Any Amino Acid
CCXEYXCCNPACTGCY

SEQ ID NO: 438 - protein, 17 aa, Artificial Sequence
  Synthetically generated peptide
  VARIANT (1)...(17): Xaa = Any Amino Acid
CCXEYXXCCNPACTGCY

SEQ ID NO: 439 - protein, 18 aa, Artificial Sequence
  Synthetically generated peptide
  VARIANT (1)...(18): Xaa = Any Amino Acid
CCXEYXXXCCNPACTGCY

SEQ ID NO: 440 - protein, 18 aa, Artificial Sequence
  Synthetically generated peptide
  VARIANT (1)...(18): Xaa = Any Amino Acid
CCXEYXXCCXNPACTGCY

SEQ ID NO: 441 - protein, 18 aa, Artificial Sequence
  Synthetically generated peptide
  VARIANT (1)...(18): Xaa = Any Amino Acid
CCXEYXXCCNXPACTGCY

SEQ ID NO: 442 - protein, 18 aa, Artificial Sequence
  Synthetically generated peptide
  VARIANT (1)...(18): Xaa = Any Amino Acid
CCXEYXXCCNPXACTGCY

SEQ ID NO: 443 - protein, 18 aa, Artificial Sequence
  Synthetically generated peptide
  VARIANT (1)...(18): Xaa = Any Amino Acid
CCXEYXXCCNPAXCTGCY

SEQ ID NO: 444 - protein, 18 aa, Artificial Sequence
  Synthetically generated peptide
  VARIANT (1)...(18): Xaa = Any Amino Acid
CCXEYXXCCNPACXTGCY

SEQ ID NO: 445 - protein, 18 aa, Artificial Sequence
  Synthetically generated peptide
  VARIANT (1)...(18): Xaa = Any Amino Acid
CCXEYXXCCNPACTXGCY

SEQ ID NO: 446 - protein, 18 aa, Artificial Sequence
  Synthetically generated peptide
  VARIANT (1)...(18): Xaa = Any Amino Acid
CCXEYXXCCNPACTGXCY

SEQ ID NO: 447 - protein, 18 aa, Artificial Sequence
  Synthetically generated peptide
  VARIANT (1)...(18): Xaa = Any Amino Acid
CCXEYXXCCNPACTGCXY

SEQ ID NO: 448 - protein, 17 aa, Artificial Sequence
  Synthetically generated peptide
  VARIANT (1)...(17): Xaa = Any Amino Acid
CCXEYXCCXNPACTGCY

SEQ ID NO: 449 - protein, 18 aa, Artificial Sequence
  Synthetically generated peptide
  VARIANT (1)...(18): Xaa = Any Amino Acid
CCXEYXCCXXNPACTGCY

SEQ ID NO: 450 - protein, 18 aa, Artificial Sequence
  Synthetically generated peptide
  VARIANT (1)...(18): Xaa = Any Amino Acid
CCXEYXCCXNXPACTGCY

SEQ ID NO: 451 - protein, 18 aa, Artificial Sequence
  Synthetically generated peptide
  VARIANT (1)...(18): Xaa = Any Amino Acid
CCXEYXCCXNPXACTGCY

SEQ ID NO: 452 - protein, 18 aa, Artificial Sequence
  Synthetically generated peptide
  VARIANT (1)...(18): Xaa = Any Amino Acid
CCXEYXCCXNPAXCTGCY

SEQ ID NO: 453 - protein, 18 aa, Artificial Sequence
  Synthetically generated peptide
  VARIANT (1)...(18): Xaa = Any Amino Acid
CCXEYXCCXNPACXTGCY

SEQ ID NO: 454 - protein, 18 aa, Artificial Sequence
  Synthetically generated peptide
  VARIANT (1)...(18): Xaa = Any Amino Acid
CCXEYXCCXNPACTXGCY

SEQ ID NO: 455 - protein, 18 aa, Artificial Sequence
  Synthetically generated peptide
  VARIANT (1)...(18): Xaa = Any Amino Acid
CCXEYXCCXNPACTGXCY

SEQ ID NO: 456 - protein, 18 aa, Artificial Sequence
  Synthetically generated peptide
  VARIANT (1)...(18): Xaa = Any Amino Acid
CCXEYXCCXNPACTGCXY

SEQ ID NO: 457 - protein, 17 aa, Artificial Sequence
  Synthetically generated peptide
  VARIANT (1)...(17): Xaa = Any Amino Acid
CCXEYXCCNXPACTGCY

SEQ ID NO: 458 - protein, 18 aa, Artificial Sequence
  Synthetically generated peptide
  VARIANT (1)...(18): Xaa = Any Amino Acid
CCXEYXCCNXXPACTGCY

SEQ ID NO: 459 - protein, 18 aa, Artificial Sequence
  Synthetically generated peptide
  VARIANT (1)...(18): Xaa = Any Amino Acid
CCXEYXCCNXPXACTGCY

SEQ ID NO: 460 - protein, 18 aa, Artificial Sequence
  Synthetically generated peptide
  VARIANT (1)...(18): Xaa = Any Amino Acid
CCXEYXCCNXPAXCTGCY

SEQ ID NO: 461 - protein, 18 aa, Artificial Sequence
  Synthetically generated peptide
  VARIANT (1)...(18): Xaa = Any Amino Acid
CCXEYXCCNXPACXTGCY

SEQ ID NO: 462 - protein, 18 aa, Artificial Sequence
  Synthetically generated peptide
  VARIANT (1)...(18): Xaa = Any Amino Acid
CCXEYXCCNXPACTXGCY

SEQ ID NO: 463 - protein, 18 aa, Artificial Sequence
  Synthetically generated peptide
  VARIANT (1)...(18): Xaa = Any Amino Acid
CCXEYXCCNXPACTGXCY

SEQ ID NO: 464 - protein, 18 aa, Artificial Sequence
  Synthetically generated peptide
  VARIANT (1)...(18): Xaa = Any Amino Acid
CCXEYXCCNXPACTGCXY

SEQ ID NO: 465 - protein, 17 aa, Artificial Sequence
  Synthetically generated peptide
  VARIANT (1)...(17): Xaa = Any Amino Acid
CCXEYXCCNPXACTGCY

SEQ ID NO: 466 - protein, 18 aa, Artificial Sequence
  Synthetically generated peptide
  VARIANT (1)...(18): Xaa = Any Amino Acid
CCXEYXCCNPXXACTGCY

SEQ ID NO: 467 - protein, 18 aa, Artificial Sequence
  Synthetically generated peptide
  VARIANT (1)...(18): Xaa = Any Amino Acid
CCXEYXCCNPXAXCTGCY

SEQ ID NO: 468 - protein, 18 aa, Artificial Sequence
  Synthetically generated peptide
  VARIANT (1)...(18): Xaa = Any Amino Acid
CCXEYXCCNPXACXTGCY

SEQ ID NO: 469 - protein, 18 aa, Artificial Sequence
  Synthetically generated peptide
  VARIANT (1)...(18): Xaa = Any Amino Acid
CCXEYXCCNPXACTXGCY

SEQ ID NO: 470 - protein, 18 aa, Artificial Sequence
  Synthetically generated peptide
  VARIANT (1)...(18): Xaa = Any Amino Acid
CCXEYXCCNPXACTGXCY

SEQ ID NO: 471 - protein, 18 aa, Artificial Sequence
  Synthetically generated peptide
  VARIANT (1)...(18): Xaa = Any Amino Acid
CCXEYXCCNPXACTGCXY

SEQ ID NO: 472 - protein, 17 aa, Artificial Sequence
  Synthetically generated peptide
  VARIANT (1)...(17): Xaa = Any Amino Acid
CCXEYXCCNPAXCTGCY

SEQ ID NO: 473 - protein, 18 aa, Artificial Sequence
  Synthetically generated peptide
  VARIANT (1)...(18): Xaa = Any Amino Acid
CCXEYXCCNPAXXCTGCY

SEQ ID NO: 474 - protein, 18 aa, Artificial Sequence
  Synthetically generated peptide
  VARIANT (1)...(18): Xaa = Any Amino Acid
CCXEYXCCNPAXCXTGCY

SEQ ID NO: 475 - protein, 18 aa, Artificial Sequence
  Synthetically generated peptide
  VARIANT (1)...(18): Xaa = Any Amino Acid
CCXEYXCCNPAXCTXGCY

SEQ ID NO: 476 - protein, 18 aa, Artificial Sequence
  Synthetically generated peptide
  VARIANT (1)...(18): Xaa = Any Amino Acid
CCXEYXCCNPAXCTGXCY

SEQ ID NO: 477 - protein, 18 aa, Artificial Sequence
  Synthetically generated peptide
  VARIANT (1)...(18): Xaa = Any Amino Acid
CCXEYXCCNPAXCTGCXY

SEQ ID NO: 478 - protein, 17 aa, Artificial Sequence
  Synthetically generated peptide
  VARIANT (1)...(17): Xaa = Any Amino Acid
CCXEYXCCNPACXTGCY

SEQ ID NO: 479 - protein, 18 aa, Artificial Sequence
  Synthetically generated peptide
  VARIANT (1)...(18): Xaa = Any Amino Acid
CCXEYXCCNPACXXTGCY

SEQ ID NO: 480 - protein, 18 aa, Artificial Sequence
  Synthetically generated peptide
  VARIANT (1)...(18): Xaa = Any Amino Acid
CCXEYXCCNPACXTXGCY

SEQ ID NO: 481 - protein, 18 aa, Artificial Sequence
  Synthetically generated peptide
  VARIANT (1)...(18): Xaa = Any Amino Acid
CCXEYXCCNPACXTGXCY

SEQ ID NO: 482 - protein, 18 aa, Artificial Sequence
  Synthetically generated peptide
  VARIANT (1)...(18): Xaa = Any Amino Acid
CCXEYXCCNPACXTGCXY

SEQ ID NO: 483 - protein, 17 aa, Artificial Sequence
  Synthetically generated peptide
  VARIANT (1)...(17): Xaa = Any Amino Acid
CCXEYXCCNPACTXGCY

SEQ ID NO: 484 - protein, 18 aa, Artificial Sequence
  Synthetically generated peptide
  VARIANT (1)...(18): Xaa = Any Amino Acid
CCXEYXCCNPACTXXGCY

SEQ ID NO: 485 - protein, 18 aa, Artificial Sequence
  Synthetically generated peptide
  VARIANT (1)...(18): Xaa = Any Amino Acid
CCXEYXCCNPACTXGXCY

SEQ ID NO: 486 - protein, 18 aa, Artificial Sequence
  Synthetically generated peptide
  VARIANT (1)...(18): Xaa = Any Amino Acid
CCXEYXCCNPACTXGCXY

SEQ ID NO: 487 - protein, 17 aa, Artificial Sequence
  Synthetically generated peptide
  VARIANT (1)...(17): Xaa = Any Amino Acid
CCXEYXCCNPACTGXCY

SEQ ID NO: 488 - protein, 18 aa, Artificial Sequence
  Synthetically generated peptide
  VARIANT (1)...(18): Xaa = Any Amino Acid
CCXEYXCCNPACTGXXCY

SEQ ID NO: 489 - protein, 18 aa, Artificial Sequence
  Synthetically generated peptide
  VARIANT (1)...(18): Xaa = Any Amino Acid
CCXEYXCCNPACTGXCXY

SEQ ID NO: 490 - protein, 17 aa, Artificial Sequence
  Synthetically generated peptide
  VARIANT (1)...(17): Xaa = Any Amino Acid
CCXEYXCCNPACTGCXY

SEQ ID NO: 491 - protein, 18 aa, Artificial Sequence
  Synthetically generated peptide
  VARIANT (1)...(18): Xaa = Any Amino Acid
CCXEYXCCNPACTGCXXY

SEQ ID NO: 492 - protein, 16 aa, Artificial Sequence
  Synthetically generated peptide
  VARIANT (1)...(16): Xaa = Any Amino Acid
  VARIANT (1)...(16): Xaa = Any Amino Acid
CCXEYCCXNPACTGCY

SEQ ID NO: 493 - protein, 17 aa, Artificial Sequence
  Synthetically generated peptide
  VARIANT (1)...(17): Xaa = Any Amino Acid
CCXEYCCXXNPACTGCY

SEQ ID NO: 494 - protein, 18 aa, Artificial Sequence
  Synthetically generated peptide
  VARIANT (1)...(18): Xaa = Any Amino Acid
CCXEYCCXXXNPACTGCY

SEQ ID NO: 495 - protein, 18 aa, Artificial Sequence
  Synthetically generated peptide
  VARIANT (1)...(18): Xaa = Any Amino Acid
CCXEYCCXXNXPACTGCY

SEQ ID NO: 496 - protein, 18 aa, Artificial Sequence
  Synthetically generated peptide
  VARIANT (1)...(18): Xaa = Any Amino Acid
CCXEYCCXXNPXACTGCY

SEQ ID NO: 497 - protein, 18 aa, Artificial Sequence
  Synthetically generated peptide
  VARIANT (1)...(18): Xaa = Any Amino Acid
CCXEYCCXXNPAXCTGCY

SEQ ID NO: 498 - protein, 18 aa, Artificial Sequence
  Synthetically generated peptide
  VARIANT (1)...(18): Xaa = Any Amino Acid
CCXEYCCXXNPACXTGCY

SEQ ID NO: 499 - protein, 18 aa, Artificial Sequence
  Synthetically generated peptide
  VARIANT (1)...(18): Xaa = Any Amino Acid
CCXEYCCXXNPACTXGCY

SEQ ID NO: 500 - protein, 18 aa, Artificial Sequence
  Synthetically generated peptide
  VARIANT (1)...(18): Xaa = Any Amino Acid
CCXEYCCXXNPACTGXCY

SEQ ID NO: 501 - protein, 18 aa, Artificial Sequence
  Synthetically generated peptide
  VARIANT (1)...(18): Xaa = Any Amino Acid
CCXEYCCXXNPACTGCXY

SEQ ID NO: 502 - protein, 17 aa, Artificial Sequence
  Synthetically generated peptide
  VARIANT (1)...(17): Xaa = Any Amino Acid
CCXEYCCXNXPACTGCY

SEQ ID NO: 503 - protein, 18 aa, Artificial Sequence
  Synthetically generated peptide
  VARIANT (1)...(18): Xaa = Any Amino Acid
CCXEYCCXNXXPACTGCY

SEQ ID NO: 504 - protein, 18 aa, Artificial Sequence
  Synthetically generated peptide
  VARIANT (1)...(18): Xaa = Any Amino Acid
CCXEYCCXNXPXACTGCY

SEQ ID NO: 505 - protein, 18 aa, Artificial Sequence
  Synthetically generated peptide
  VARIANT (1)...(18): Xaa = Any Amino Acid
CCXEYCCXNXPAXCTGCY

SEQ ID NO: 506 - protein, 18 aa, Artificial Sequence
  Synthetically generated peptide
  VARIANT (1)...(18): Xaa = Any Amino Acid
CCXEYCCXNXPACXTGCY

SEQ ID NO: 507 - protein, 18 aa, Artificial Sequence
  Synthetically generated peptide
  VARIANT (1)...(18): Xaa = Any Amino Acid
CCXEYCCXNXPACTXGCY

SEQ ID NO: 508 - protein, 18 aa, Artificial Sequence
  Synthetically generated peptide
  VARIANT (1)...(18): Xaa = Any Amino Acid
CCXEYCCXNXPACTGXCY

SEQ ID NO: 509 - protein, 18 aa, Artificial Sequence
  Synthetically generated peptide
  VARIANT (1)...(18): Xaa = Any Amino Acid
CCXEYCCXNXPACTGCXY

SEQ ID NO: 510 - protein, 17 aa, Artificial Sequence
  Synthetically generated peptide
  VARIANT (1)...(17): Xaa = Any Amino Acid
CCXEYCCXNPXACTGCY

SEQ ID NO: 511 - protein, 18 aa, Artificial Sequence
  Synthetically generated peptide
  VARIANT (1)...(18): Xaa = Any Amino Acid
CCXEYCCXNPXXACTGCY

SEQ ID NO: 512 - protein, 18 aa, Artificial Sequence
  Synthetically generated peptide
  VARIANT (1)...(18): Xaa = Any Amino Acid
CCXEYCCXNPXAXCTGCY

SEQ ID NO: 513 - protein, 18 aa, Artificial Sequence
  Synthetically generated peptide
  VARIANT (1)...(18): Xaa = Any Amino Acid
CCXEYCCXNPXACXTGCY

SEQ ID NO: 514 - protein, 18 aa, Artificial Sequence
  Synthetically generated peptide
  VARIANT (1)...(18): Xaa = Any Amino Acid
CCXEYCCXNPXACTXGCY

SEQ ID NO: 515 - protein, 18 aa, Artificial Sequence
  Synthetically generated peptide
  VARIANT (1)...(18): Xaa = Any Amino Acid
CCXEYCCXNPXACTGXCY

SEQ ID NO: 516 - protein, 18 aa, Artificial Sequence
  Synthetically generated peptide
  VARIANT (1)...(18): Xaa = Any Amino Acid
CCXEYCCXNPXACTGCXY

SEQ ID NO: 517 - protein, 17 aa, Artificial Sequence
  Synthetically generated peptide
  VARIANT (1)...(17): Xaa = Any Amino Acid
CCXEYCCXNPAXCTGCY

SEQ ID NO: 518 - protein, 18 aa, Artificial Sequence
  Synthetically generated peptide
  VARIANT (1)...(18): Xaa = Any Amino Acid
CCXEYCCXNPAXXCTGCY

SEQ ID NO: 519 - protein, 18 aa, Artificial Sequence
  Synthetically generated peptide
  VARIANT (1)...(18): Xaa = Any Amino Acid
CCXEYCCXNPAXCXTGCY

SEQ ID NO: 520 - protein, 18 aa, Artificial Sequence
  Synthetically generated peptide
  VARIANT (1)...(18): Xaa = Any Amino Acid
CCXEYCCXNPAXCTXGCY

SEQ ID NO: 521 - protein, 18 aa, Artificial Sequence
  Synthetically generated peptide
  VARIANT (1)...(18): Xaa = Any Amino Acid
CCXEYCCXNPAXCTGXCY

SEQ ID NO: 522 - protein, 18 aa, Artificial Sequence
  Synthetically generated peptide
  VARIANT (1)...(18): Xaa = Any Amino Acid
CCXEYCCXNPAXCTGCXY

SEQ ID NO: 523 - protein, 17 aa, Artificial Sequence
  Synthetically generated peptide
  VARIANT (1)...(17): Xaa = Any Amino Acid
CCXEYCCXNPACXTGCY

SEQ ID NO: 524 - protein, 18 aa, Artificial Sequence
  Synthetically generated peptide
  VARIANT (1)...(18): Xaa = Any Amino Acid
CCXEYCCXNPACXXTGCY

SEQ ID NO: 525 - protein, 18 aa, Artificial Sequence
  Synthetically generated peptide
  VARIANT (1)...(18): Xaa = Any Amino Acid
CCXEYCCXNPACXTXGCY

SEQ ID NO: 526 - protein, 18 aa, Artificial Sequence
  Synthetically generated peptide
  VARIANT (1)...(18): Xaa = Any Amino Acid
CCXEYCCXNPACXTGXCY

SEQ ID NO: 527 - protein, 18 aa, Artificial Sequence
  Synthetically generated peptide
  VARIANT (1)...(18): Xaa = Any Amino Acid
CCXEYCCXNPACXTGCXY

SEQ ID NO: 528 - protein, 17 aa, Artificial Sequence
  Synthetically generated peptide
  VARIANT (1)...(17): Xaa = Any Amino Acid
CCXEYCCXNPACTXGCY

SEQ ID NO: 529 - protein, 18 aa, Artificial Sequence
  Synthetically generated peptide
  VARIANT (1)...(18): Xaa = Any Amino Acid
CCXEYCCXNPACTXXGCY

SEQ ID NO: 530 - protein, 18 aa, Artificial Sequence
  Synthetically generated peptide
  VARIANT (1)...(18): Xaa = Any Amino Acid
CCXEYCCXNPACTXGXCY

SEQ ID NO: 531 - protein, 18 aa, Artificial Sequence
  Synthetically generated peptide
  VARIANT (1)...(18): Xaa = Any Amino Acid
CCXEYCCXNPACTXGCXY

SEQ ID NO: 532 - protein, 17 aa, Artificial Sequence
  Synthetically generated peptide
  VARIANT (1)...(17): Xaa = Any Amino Acid
CCXEYCCXNPACTGXCY

SEQ ID NO: 533 - protein, 18 aa, Artificial Sequence
  Synthetically generated peptide
  VARIANT (1)...(18): Xaa = Any Amino Acid
CCXEYCCXNPACTGXXCY

SEQ ID NO: 534 - protein, 18 aa, Artificial Sequence
  Synthetically generated peptide
  VARIANT (1)...(18): Xaa = Any Amino Acid
CCXEYCCXNPACTGXCXY

SEQ ID NO: 535 - protein, 17 aa, Artificial Sequence
  Synthetically generated peptide
  VARIANT (1)...(17): Xaa = Any Amino Acid
CCXEYCCXNPACTGCXY

SEQ ID NO: 536 - protein, 18 aa, Artificial Sequence
  Synthetically generated peptide
  VARIANT (1)...(18): Xaa = Any Amino Acid
CCXEYCCXNPACTGCXXY

SEQ ID NO: 537 - protein, 16 aa, Artificial Sequence
  Synthetically generated peptide
  VARIANT (1)...(16): Xaa = Any Amino Acid
  VARIANT (1)...(16): Xaa = Any Amino Acid
CCXEYCCNXPACTGCY

SEQ ID NO: 538 - protein, 17 aa, Artificial Sequence
  Synthetically generated peptide
  VARIANT (1)...(17): Xaa = Any Amino Acid
CCXEYCCNXXPACTGCY

SEQ ID NO: 539 - protein, 18 aa, Artificial Sequence
  Synthetically generated peptide
  VARIANT (1)...(18): Xaa = Any Amino Acid
CCXEYCCNXXXPACTGCY

SEQ ID NO: 540 - protein, 18 aa, Artificial Sequence
  Synthetically generated peptide
  VARIANT (1)...(18): Xaa = Any Amino Acid
CCXEYCCNXXPXACTGCY

SEQ ID NO: 541 - protein, 18 aa, Artificial Sequence
  Synthetically generated peptide
  VARIANT (1)...(18): Xaa = Any Amino Acid
CCXEYCCNXXPAXCTGCY

SEQ ID NO: 542 - protein, 18 aa, Artificial Sequence
  Synthetically generated peptide
  VARIANT (1)...(18): Xaa = Any Amino Acid
CCXEYCCNXXPACXTGCY

SEQ ID NO: 543 - protein, 18 aa, Artificial Sequence
  Synthetically generated peptide
  VARIANT (1)...(18): Xaa = Any Amino Acid
CCXEYCCNXXPACTXGCY

SEQ ID NO: 544 - protein, 18 aa, Artificial Sequence
  Synthetically generated peptide
  VARIANT (1)...(18): Xaa = Any Amino Acid
CCXEYCCNXXPACTGXCY

SEQ ID NO: 545 - protein, 18 aa, Artificial Sequence
  Synthetically generated peptide
  VARIANT (1)...(18): Xaa = Any Amino Acid
CCXEYCCNXXPACTGCXY

SEQ ID NO: 546 - protein, 17 aa, Artificial Sequence
  Synthetically generated peptide
  VARIANT (1)...(17): Xaa = Any Amino Acid
CCXEYCCNXPXACTGCY

SEQ ID NO: 547 - protein, 18 aa, Artificial Sequence
  Synthetically generated peptide
  VARIANT (1)...(18): Xaa = Any Amino Acid
CCXEYCCNXPXXACTGCY

SEQ ID NO: 548 - protein, 18 aa, Artificial Sequence
  Synthetically generated peptide
  VARIANT (1)...(18): Xaa = Any Amino Acid
CCXEYCCNXPXAXCTGCY

SEQ ID NO: 549 - protein, 18 aa, Artificial Sequence
  Synthetically generated peptide
  VARIANT (1)...(18): Xaa = Any Amino Acid
CCXEYCCNXPXACXTGCY

SEQ ID NO: 550 - protein, 18 aa, Artificial Sequence
  Synthetically generated peptide
  VARIANT (1)...(18): Xaa = Any Amino Acid
CCXEYCCNXPXACTXGCY

SEQ ID NO: 551 - protein, 18 aa, Artificial Sequence
  Synthetically generated peptide
  VARIANT (1)...(18): Xaa = Any Amino Acid
CCXEYCCNXPXACTGXCY

SEQ ID NO: 552 - protein, 18 aa, Artificial Sequence
  Synthetically generated peptide
  VARIANT (1)...(18): Xaa = Any Amino Acid
CCXEYCCNXPXACTGCXY

SEQ ID NO: 553 - protein, 17 aa, Artificial Sequence
  Synthetically generated peptide
  VARIANT (1)...(17): Xaa = Any Amino Acid
CCXEYCCNXPAXCTGCY

SEQ ID NO: 554 - protein, 18 aa, Artificial Sequence
  Synthetically generated peptide
  VARIANT (1)...(18): Xaa = Any Amino Acid
CCXEYCCNXPAXXCTGCY

SEQ ID NO: 555 - protein, 18 aa, Artificial Sequence
  Synthetically generated peptide
  VARIANT (1)...(18): Xaa = Any Amino Acid
CCXEYCCNXPAXCXTGCY

SEQ ID NO: 556 - protein, 18 aa, Artificial Sequence
  Synthetically generated peptide
  VARIANT (1)...(18): Xaa = Any Amino Acid
CCXEYCCNXPAXCTXGCY

SEQ ID NO: 557 - protein, 18 aa, Artificial Sequence
  Synthetically generated peptide
  VARIANT (1)...(18): Xaa = Any Amino Acid
CCXEYCCNXPAXCTGXCY

SEQ ID NO: 558 - protein, 18 aa, Artificial Sequence
  Synthetically generated peptide
  VARIANT (1)...(18): Xaa = Any Amino Acid
CCXEYCCNXPAXCTGCXY

SEQ ID NO: 559 - protein, 17 aa, Artificial Sequence
  Synthetically generated peptide
  VARIANT (1)...(17): Xaa = Any Amino Acid
CCXEYCCNXPACXTGCY

SEQ ID NO: 560 - protein, 18 aa, Artificial Sequence
  Synthetically generated peptide
  VARIANT (1)...(18): Xaa = Any Amino Acid
CCXEYCCNXPACXXTGCY

SEQ ID NO: 561 - protein, 18 aa, Artificial Sequence
  Synthetically generated peptide
  VARIANT (1)...(18): Xaa = Any Amino Acid
CCXEYCCNXPACXTXGCY

SEQ ID NO: 562 - protein, 18 aa, Artificial Sequence
  Synthetically generated peptide
  VARIANT (1)...(18): Xaa = Any Amino Acid
CCXEYCCNXPACXTGXCY

SEQ ID NO: 563 - protein, 18 aa, Artificial Sequence
  Synthetically generated peptide
  VARIANT (1)...(18): Xaa = Any Amino Acid
CCXEYCCNXPACXTGCXY

SEQ ID NO: 564 - protein, 17 aa, Artificial Sequence
  Synthetically generated peptide
  VARIANT (1)...(17): Xaa = Any Amino Acid
CCXEYCCNXPACTXGCY

SEQ ID NO: 565 - protein, 18 aa, Artificial Sequence
  Synthetically generated peptide
  VARIANT (1)...(18): Xaa = Any Amino Acid
CCXEYCCNXPACTXXGCY

SEQ ID NO: 566 - protein, 18 aa, Artificial Sequence
  Synthetically generated peptide
  VARIANT (1)...(18): Xaa = Any Amino Acid
CCXEYCCNXPACTXGXCY

SEQ ID NO: 567 - protein, 18 aa, Artificial Sequence
  Synthetically generated peptide
  VARIANT (1)...(18): Xaa = Any Amino Acid
CCXEYCCNXPACTXGCXY

SEQ ID NO: 568 - protein, 17 aa, Artificial Sequence
  Synthetically generated peptide
  VARIANT (1)...(17): Xaa = Any Amino Acid
CCXEYCCNXPACTGXCY

SEQ ID NO: 569 - protein, 18 aa, Artificial Sequence
  Synthetically generated peptide
  VARIANT (1)...(18): Xaa = Any Amino Acid
CCXEYCCNXPACTGXXCY

SEQ ID NO: 570 - protein, 18 aa, Artificial Sequence
  Synthetically generated peptide
  VARIANT (1)...(18): Xaa = Any Amino Acid
CCXEYCCNXPACTGXCXY

SEQ ID NO: 571 - protein, 17 aa, Artificial Sequence
  Synthetically generated peptide
  VARIANT (1)...(17): Xaa = Any Amino Acid
CCXEYCCNXPACTGCXY

SEQ ID NO: 572 - protein, 18 aa, Artificial Sequence
  Synthetically generated peptide
  VARIANT (1)...(18): Xaa = Any Amino Acid
CCXEYCCNXPACTGCXXY

SEQ ID NO: 573 - protein, 16 aa, Artificial Sequence
  Synthetically generated peptide
  VARIANT (1)...(16): Xaa = Any Amino Acid
  VARIANT (1)...(16): Xaa = Any Amino Acid
CCXEYCCNPXACTGCY

SEQ ID NO: 574 - protein, 17 aa, Artificial Sequence
  Synthetically generated peptide
  VARIANT (1)...(17): Xaa = Any Amino Acid
CCXEYCCNPXXACTGCY

SEQ ID NO: 575 - protein, 18 aa, Artificial Sequence
  Synthetically generated peptide
  VARIANT (1)...(18): Xaa = Any Amino Acid
CCXEYCCNPXXXACTGCY

SEQ ID NO: 576 - protein, 18 aa, Artificial Sequence
  Synthetically generated peptide
  VARIANT (1)...(18): Xaa = Any Amino Acid
CCXEYCCNPXXAXCTGCY

SEQ ID NO: 577 - protein, 18 aa, Artificial Sequence
  Synthetically generated peptide
  VARIANT (1)...(18): Xaa = Any Amino Acid
CCXEYCCNPXXACXTGCY

SEQ ID NO: 578 - protein, 18 aa, Artificial Sequence
  Synthetically generated peptide
  VARIANT (1)...(18): Xaa = Any Amino Acid
CCXEYCCNPXXACTXGCY

SEQ ID NO: 579 - protein, 18 aa, Artificial Sequence
  Synthetically generated peptide
  VARIANT (1)...(18): Xaa = Any Amino Acid
CCXEYCCNPXXACTGXCY

SEQ ID NO: 580 - protein, 18 aa, Artificial Sequence
  Synthetically generated peptide
  VARIANT (1)...(18): Xaa = Any Amino Acid
CCXEYCCNPXXACTGCXY

SEQ ID NO: 581 - protein, 17 aa, Artificial Sequence
  Synthetically generated peptide
  VARIANT (1)...(17): Xaa = Any Amino Acid
CCXEYCCNPXAXCTGCY

SEQ ID NO: 582 - protein, 18 aa, Artificial Sequence
  Synthetically generated peptide
  VARIANT (1)...(18): Xaa = Any Amino Acid
CCXEYCCNPXAXXCTGCY

SEQ ID NO: 583 - protein, 18 aa, Artificial Sequence
  Synthetically generated peptide
  VARIANT (1)...(18): Xaa = Any Amino Acid
CCXEYCCNPXAXCXTGCY

SEQ ID NO: 584 - protein, 18 aa, Artificial Sequence
  Synthetically generated peptide
  VARIANT (1)...(18): Xaa = Any Amino Acid
CCXEYCCNPXAXCTXGCY

SEQ ID NO: 585 - protein, 18 aa, Artificial Sequence
  Synthetically generated peptide
  VARIANT (1)...(18): Xaa = Any Amino Acid
CCXEYCCNPXAXCTGXCY

SEQ ID NO: 586 - protein, 18 aa, Artificial Sequence
  Synthetically generated peptide
  VARIANT (1)...(18): Xaa = Any Amino Acid
CCXEYCCNPXAXCTGCXY

SEQ ID NO: 587 - protein, 17 aa, Artificial Sequence
  Synthetically generated peptide
  VARIANT (1)...(17): Xaa = Any Amino Acid
CCXEYCCNPXACXTGCY

SEQ ID NO: 588 - protein, 18 aa, Artificial Sequence
  Synthetically generated peptide
  VARIANT (1)...(18): Xaa = Any Amino Acid
CCXEYCCNPXACXXTGCY

SEQ ID NO: 589 - protein, 18 aa, Artificial Sequence
  Synthetically generated peptide
  VARIANT (1)...(18): Xaa = Any Amino Acid
CCXEYCCNPXACXTXGCY

SEQ ID NO: 590 - protein, 18 aa, Artificial Sequence
  Synthetically generated peptide
  VARIANT (1)...(18): Xaa = Any Amino Acid
CCXEYCCNPXACXTGXCY

SEQ ID NO: 591 - protein, 18 aa, Artificial Sequence
  Synthetically generated peptide
  VARIANT (1)...(18): Xaa = Any Amino Acid
CCXEYCCNPXACXTGCXY

SEQ ID NO: 592 - protein, 17 aa, Artificial Sequence
  Synthetically generated peptide
  VARIANT (1)...(17): Xaa = Any Amino Acid
CCXEYCCNPXACTXGCY

SEQ ID NO: 593 - protein, 18 aa, Artificial Sequence
  Synthetically generated peptide
  VARIANT (1)...(18): Xaa = Any Amino Acid
CCXEYCCNPXACTXXGCY

SEQ ID NO: 594 - protein, 18 aa, Artificial Sequence
  Synthetically generated peptide
  VARIANT (1)...(18): Xaa = Any Amino Acid
CCXEYCCNPXACTXGXCY

SEQ ID NO: 595 - protein, 18 aa, Artificial Sequence
  Synthetically generated peptide
  VARIANT (1)...(18): Xaa = Any Amino Acid
CCXEYCCNPXACTXGCXY

SEQ ID NO: 596 - protein, 17 aa, Artificial Sequence
  Synthetically generated peptide
  VARIANT (1)...(17): Xaa = Any Amino Acid
CCXEYCCNPXACTGXCY

SEQ ID NO: 597 - protein, 18 aa, Artificial Sequence
  Synthetically generated peptide
  VARIANT (1)...(18): Xaa = Any Amino Acid
CCXEYCCNPXACTGXXCY

SEQ ID NO: 598 - protein, 18 aa, Artificial Sequence
  Synthetically generated peptide
  VARIANT (1)...(18): Xaa = Any Amino Acid
CCXEYCCNPXACTGXCXY

SEQ ID NO: 599 - protein, 17 aa, Artificial Sequence
  Synthetically generated peptide
  VARIANT (1)...(17): Xaa = Any Amino Acid
CCXEYCCNPXACTGCXY

SEQ ID NO: 600 - protein, 18 aa, Artificial Sequence
  Synthetically generated peptide
  VARIANT (1)...(18): Xaa = Any Amino Acid
CCXEYCCNPXACTGCXXY

SEQ ID NO: 601 - protein, 16 aa, Artificial Sequence
  Synthetically generated peptide
  VARIANT (1)...(16): Xaa = Any Amino Acid
  VARIANT (1)...(16): Xaa = Any Amino Acid
CCXEYCCNPAXCTGCY

SEQ ID NO: 602 - protein, 17 aa, Artificial Sequence
  Synthetically generated peptide
  VARIANT (1)...(17): Xaa = Any Amino Acid
CCXEYCCNPAXXCTGCY

SEQ ID NO: 603 - protein, 18 aa, Artificial Sequence
  Synthetically generated peptide
  VARIANT (1)...(18): Xaa = Any Amino Acid
CCXEYCCNPAXXXCTGCY

SEQ ID NO: 604 - protein, 18 aa, Artificial Sequence
  Synthetically generated peptide
  VARIANT (1)...(18): Xaa = Any Amino Acid
CCXEYCCNPAXXCXTGCY

SEQ ID NO: 605 - protein, 18 aa, Artificial Sequence
  Synthetically generated peptide
  VARIANT (1)...(18): Xaa = Any Amino Acid
CCXEYCCNPAXXCTXGCY

SEQ ID NO: 606 - protein, 18 aa, Artificial Sequence
  Synthetically generated peptide
  VARIANT (1)...(18): Xaa = Any Amino Acid
CCXEYCCNPAXXCTGXCY

SEQ ID NO: 607 - protein, 18 aa, Artificial Sequence
  Synthetically generated peptide
  VARIANT (1)...(18): Xaa = Any Amino Acid
CCXEYCCNPAXXCTGCXY

SEQ ID NO: 608 - protein, 17 aa, Artificial Sequence
  Synthetically generated peptide
  VARIANT (1)...(17): Xaa = Any Amino Acid
CCXEYCCNPAXCXTGCY

SEQ ID NO: 609 - protein, 18 aa, Artificial Sequence
  Synthetically generated peptide
  VARIANT (1)...(18): Xaa = Any Amino Acid
CCXEYCCNPAXCXXTGCY

SEQ ID NO: 610 - protein, 18 aa, Artificial Sequence
  Synthetically generated peptide
  VARIANT (1)...(18): Xaa = Any Amino Acid
CCXEYCCNPAXCXTXGCY

SEQ ID NO: 611 - protein, 18 aa, Artificial Sequence
  Synthetically generated peptide
  VARIANT (1)...(18): Xaa = Any Amino Acid
CCXEYCCNPAXCXTGXCY

SEQ ID NO: 612 - protein, 18 aa, Artificial Sequence
  Synthetically generated peptide
  VARIANT (1)...(18): Xaa = Any Amino Acid
CCXEYCCNPAXCXTGCXY

SEQ ID NO: 613 - protein, 17 aa, Artificial Sequence
  Synthetically generated peptide
  VARIANT (1)...(17): Xaa = Any Amino Acid
CCXEYCCNPAXCTXGCY

SEQ ID NO: 614 - protein, 18 aa, Artificial Sequence
  Synthetically generated peptide
  VARIANT (1)...(18): Xaa = Any Amino Acid
CCXEYCCNPAXCTXXGCY

SEQ ID NO: 615 - protein, 18 aa, Artificial Sequence
  Synthetically generated peptide
  VARIANT (1)...(18): Xaa = Any Amino Acid
CCXEYCCNPAXCTXGXCY

SEQ ID NO: 616 - protein, 18 aa, Artificial Sequence
  Synthetically generated peptide
  VARIANT (1)...(18): Xaa = Any Amino Acid
CCXEYCCNPAXCTXGCXY

SEQ ID NO: 617 - protein, 17 aa, Artificial Sequence
  Synthetically generated peptide
  VARIANT (1)...(17): Xaa = Any Amino Acid
CCXEYCCNPAXCTGXCY

SEQ ID NO: 618 - protein, 18 aa, Artificial Sequence
  Synthetically generated peptide
  VARIANT (1)...(18): Xaa = Any Amino Acid
CCXEYCCNPAXCTGXXCY

SEQ ID NO: 619 - protein, 18 aa, Artificial Sequence
  Synthetically generated peptide
  VARIANT (1)...(18): Xaa = Any Amino Acid
CCXEYCCNPAXCTGXCXY

SEQ ID NO: 620 - protein, 17 aa, Artificial Sequence
  Synthetically generated peptide
  VARIANT (1)...(17): Xaa = Any Amino Acid
CCXEYCCNPAXCTGCXY

SEQ ID NO: 621 - protein, 18 aa, Artificial Sequence
  Synthetically generated peptide
  VARIANT (1)...(18): Xaa = Any Amino Acid
CCXEYCCNPAXCTGCXXY

SEQ ID NO: 622 - protein, 16 aa, Artificial Sequence
  Synthetically generated peptide
  VARIANT (1)...(16): Xaa = Any Amino Acid
  VARIANT (1)...(16): Xaa = Any Amino Acid
CCXEYCCNPACXTGCY

SEQ ID NO: 623 - protein, 17 aa, Artificial Sequence
  Synthetically generated peptide
  VARIANT (1)...(17): Xaa = Any Amino Acid
CCXEYCCNPACXXTGCY

SEQ ID NO: 624 - protein, 18 aa, Artificial Sequence
  Synthetically generated peptide
  VARIANT (1)...(18): Xaa = Any Amino Acid
CCXEYCCNPACXXXTGCY

SEQ ID NO: 625 - protein, 18 aa, Artificial Sequence
  Synthetically generated peptide
  VARIANT (1)...(18): Xaa = Any Amino Acid
CCXEYCCNPACXXTXGCY

SEQ ID NO: 626 - protein, 18 aa, Artificial Sequence
  Synthetically generated peptide
  VARIANT (1)...(18): Xaa = Any Amino Acid
CCXEYCCNPACXXTGXCY

SEQ ID NO: 627 - protein, 18 aa, Artificial Sequence
  Synthetically generated peptide
  VARIANT (1)...(18): Xaa = Any Amino Acid
CCXEYCCNPACXXTGCXY

SEQ ID NO: 628 - protein, 17 aa, Artificial Sequence
  Synthetically generated peptide
  VARIANT (1)...(17): Xaa = Any Amino Acid
CCXEYCCNPACXTXGCY

SEQ ID NO: 629 - protein, 18 aa, Artificial Sequence
  Synthetically generated peptide
  VARIANT (1)...(18): Xaa = Any Amino Acid
CCXEYCCNPACXTXXGCY

SEQ ID NO: 630 - protein, 18 aa, Artificial Sequence
  Synthetically generated peptide
  VARIANT (1)...(18): Xaa = Any Amino Acid
CCXEYCCNPACXTXGXCY

SEQ ID NO: 631 - protein, 18 aa, Artificial Sequence
  Synthetically generated peptide
  VARIANT (1)...(18): Xaa = Any Amino Acid
CCXEYCCNPACXTXGCXY

SEQ ID NO: 632 - protein, 17 aa, Artificial Sequence
  Synthetically generated peptide
  VARIANT (1)...(17): Xaa = Any Amino Acid
CCXEYCCNPACXTGXCY

SEQ ID NO: 633 - protein, 18 aa, Artificial Sequence
  Synthetically generated peptide
  VARIANT (1)...(18): Xaa = Any Amino Acid
CCXEYCCNPACXTGXXCY

SEQ ID NO: 634 - protein, 18 aa, Artificial Sequence
  Synthetically generated peptide
  VARIANT (1)...(18): Xaa = Any Amino Acid
CCXEYCCNPACXTGXCXY

SEQ ID NO: 635 - protein, 17 aa, Artificial Sequence
  Synthetically generated peptide
  VARIANT (1)...(17): Xaa = Any Amino Acid
CCXEYCCNPACXTGCXY

SEQ ID NO: 636 - protein, 18 aa, Artificial Sequence
  Synthetically generated peptide
  VARIANT (1)...(18): Xaa = Any Amino Acid
CCXEYCCNPACXTGCXXY

SEQ ID NO: 637 - protein, 16 aa, Artificial Sequence
  Synthetically generated peptide
  VARIANT (1)...(16): Xaa = Any Amino Acid
  VARIANT (1)...(16): Xaa = Any Amino Acid
CCXEYCCNPACTXGCY

SEQ ID NO: 638 - protein, 17 aa, Artificial Sequence
  Synthetically generated peptide
  VARIANT (1)...(17): Xaa = Any Amino Acid
CCXEYCCNPACTXXGCY

SEQ ID NO: 639 - protein, 18 aa, Artificial Sequence
  Synthetically generated peptide
  VARIANT (1)...(18): Xaa = Any Amino Acid
CCXEYCCNPACTXXXGCY

SEQ ID NO: 640 - protein, 18 aa, Artificial Sequence
  Synthetically generated peptide
  VARIANT (1)...(18): Xaa = Any Amino Acid
CCXEYCCNPACTXXGXCY

SEQ ID NO: 641 - protein, 18 aa, Artificial Sequence
  Synthetically generated peptide
  VARIANT (1)...(18): Xaa = Any Amino Acid
CCXEYCCNPACTXXGCXY

SEQ ID NO: 642 - protein, 17 aa, Artificial Sequence
  Synthetically generated peptide
  VARIANT (1)...(17): Xaa = Any Amino Acid
CCXEYCCNPACTXGXCY

SEQ ID NO: 643 - protein, 18 aa, Artificial Sequence
  Synthetically generated peptide
  VARIANT (1)...(18): Xaa = Any Amino Acid
CCXEYCCNPACTXGXXCY

SEQ ID NO: 644 - protein, 18 aa, Artificial Sequence
  Synthetically generated peptide
  VARIANT (1)...(18): Xaa = Any Amino Acid
CCXEYCCNPACTXGXCXY

SEQ ID NO: 645 - protein, 17 aa, Artificial Sequence
  Synthetically generated peptide
  VARIANT (1)...(17): Xaa = Any Amino Acid
CCXEYCCNPACTXGCXY

SEQ ID NO: 646 - protein, 18 aa, Artificial Sequence
  Synthetically generated peptide
  VARIANT (1)...(18): Xaa = Any Amino Acid
CCXEYCCNPACTXGCXXY

SEQ ID NO: 647 - protein, 16 aa, Artificial Sequence
  Synthetically generated peptide
  VARIANT (1)...(16): Xaa = Any Amino Acid
  VARIANT (1)...(16): Xaa = Any Amino Acid
CCXEYCCNPACTGXCY

SEQ ID NO: 648 - protein, 17 aa, Artificial Sequence
  Synthetically generated peptide
  VARIANT (1)...(17): Xaa = Any Amino Acid
CCXEYCCNPACTGXXCY

SEQ ID NO: 649 - protein, 18 aa, Artificial Sequence
  Synthetically generated peptide
  VARIANT (1)...(18): Xaa = Any Amino Acid
CCXEYCCNPACTGXXXCY

SEQ ID NO: 650 - protein, 18 aa, Artificial Sequence
  Synthetically generated peptide
  VARIANT (1)...(18): Xaa = Any Amino Acid
CCXEYCCNPACTGXXCXY

SEQ ID NO: 651 - protein, 17 aa, Artificial Sequence
  Synthetically generated peptide
  VARIANT (1)...(17): Xaa = Any Amino Acid
CCXEYCCNPACTGXCXY

SEQ ID NO: 652 - protein, 18 aa, Artificial Sequence
  Synthetically generated peptide
  VARIANT (1)...(18): Xaa = Any Amino Acid
CCXEYCCNPACTGXCXXY

SEQ ID NO: 653 - protein, 16 aa, Artificial Sequence
  Synthetically generated peptide
  VARIANT (1)...(16): Xaa = Any Amino Acid
  VARIANT (1)...(16): Xaa = Any Amino Acid
CCXEYCCNPACTGCXY

SEQ ID NO: 654 - protein, 17 aa, Artificial Sequence
  Synthetically generated peptide
  VARIANT (1)...(17): Xaa = Any Amino Acid
CCXEYCCNPACTGCXXY

SEQ ID NO: 655 - protein, 18 aa, Artificial Sequence
  Synthetically generated peptide
  VARIANT (1)...(18): Xaa = Any Amino Acid
CCXEYCCNPACTGCXXXY

SEQ ID NO: 656 - protein, 15 aa, Artificial Sequence
  Synthetically generated peptide
  VARIANT (1)...(15): Xaa = Any Amino Acid
  VARIANT (1)...(15): Xaa = Any Amino Acid
CCEXYCCNPACTGCY

SEQ ID NO: 657 - protein, 16 aa, Artificial Sequence
  Synthetically generated peptide
  VARIANT (1)...(16): Xaa = Any Amino Acid
  VARIANT (1)...(16): Xaa = Any Amino Acid
CCEXXYCCNPACTGCY

SEQ ID NO: 658 - protein, 17 aa, Artificial Sequence
  Synthetically generated peptide
  VARIANT (1)...(17): Xaa = Any Amino Acid
CCEXXXYCCNPACTGCY

SEQ ID NO: 659 - protein, 18 aa, Artificial Sequence
  Synthetically generated peptide
  VARIANT (1)...(18): Xaa = Any Amino Acid
CCEXXXXYCCNPACTGCY

SEQ ID NO: 660 - protein, 18 aa, Artificial Sequence
  Synthetically generated peptide
  VARIANT (1)...(18): Xaa = Any Amino Acid
CCEXXXYXCCNPACTGCY

SEQ ID NO: 661 - protein, 18 aa, Artificial Sequence
  Synthetically generated peptide
  VARIANT (1)...(18): Xaa = Any Amino Acid
CCEXXXYCCXNPACTGCY

SEQ ID NO: 662 - protein, 18 aa, Artificial Sequence
  Synthetically generated peptide
  VARIANT (1)...(18): Xaa = Any Amino Acid
CCEXXXYCCNXPACTGCY

SEQ ID NO: 663 - protein, 18 aa, Artificial Sequence
  Synthetically generated peptide
  VARIANT (1)...(18): Xaa = Any Amino Acid
CCEXXXYCCNPXACTGCY

SEQ ID NO: 664 - protein, 18 aa, Artificial Sequence
  Synthetically generated peptide
  VARIANT (1)...(18): Xaa = Any Amino Acid
CCEXXXYCCNPAXCTGCY

SEQ ID NO: 665 - protein, 18 aa, Artificial Sequence
  Synthetically generated peptide
  VARIANT (1)...(18): Xaa = Any Amino Acid
CCEXXXYCCNPACXTGCY

SEQ ID NO: 666 - protein, 18 aa, Artificial Sequence
  Synthetically generated peptide
  VARIANT (1)...(18): Xaa = Any Amino Acid
CCEXXXYCCNPACTXGCY

SEQ ID NO: 667 - protein, 18 aa, Artificial Sequence
  Synthetically generated peptide
  VARIANT (1)...(18): Xaa = Any Amino Acid
CCEXXXYCCNPACTGXCY

SEQ ID NO: 668 - protein, 18 aa, Artificial Sequence
  Synthetically generated peptide
  VARIANT (1)...(18): Xaa = Any Amino Acid
CCEXXXYCCNPACTGCXY

SEQ ID NO: 669 - protein, 17 aa, Artificial Sequence
  Synthetically generated peptide
  VARIANT (1)...(17): Xaa = Any Amino Acid
CCEXXYXCCNPACTGCY

SEQ ID NO: 670 - protein, 18 aa, Artificial Sequence
  Synthetically generated peptide
  VARIANT (1)...(18): Xaa = Any Amino Acid
CCEXXYXXCCNPACTGCY

SEQ ID NO: 671 - protein, 18 aa, Artificial Sequence
  Synthetically generated peptide
  VARIANT (1)...(18): Xaa = Any Amino Acid
CCEXXYXCCXNPACTGCY

SEQ ID NO: 672 - protein, 18 aa, Artificial Sequence
  Synthetically generated peptide
  VARIANT (1)...(18): Xaa = Any Amino Acid
CCEXXYXCCNXPACTGCY

SEQ ID NO: 673 - protein, 18 aa, Artificial Sequence
  Synthetically generated peptide
  VARIANT (1)...(18): Xaa = Any Amino Acid
CCEXXYXCCNPXACTGCY

SEQ ID NO: 674 - protein, 18 aa, Artificial Sequence
  Synthetically generated peptide
  VARIANT (1)...(18): Xaa = Any Amino Acid
CCEXXYXCCNPAXCTGCY

SEQ ID NO: 675 - protein, 18 aa, Artificial Sequence
  Synthetically generated peptide
  VARIANT (1)...(18): Xaa = Any Amino Acid
CCEXXYXCCNPACXTGCY

SEQ ID NO: 676 - protein, 18 aa, Artificial Sequence
  Synthetically generated peptide
  VARIANT (1)...(18): Xaa = Any Amino Acid
CCEXXYXCCNPACTXGCY

SEQ ID NO: 677 - protein, 18 aa, Artificial Sequence
  Synthetically generated peptide
  VARIANT (1)...(18): Xaa = Any Amino Acid
CCEXXYXCCNPACTGXCY

SEQ ID NO: 678 - protein, 18 aa, Artificial Sequence
  Synthetically generated peptide
  VARIANT (1)...(18): Xaa = Any Amino Acid
CCEXXYXCCNPACTGCXY

SEQ ID NO: 679 - protein, 17 aa, Artificial Sequence
  Synthetically generated peptide
  VARIANT (1)...(17): Xaa = Any Amino Acid
CCEXXYCCXNPACTGCY

SEQ ID NO: 680 - protein, 18 aa, Artificial Sequence
  Synthetically generated peptide
  VARIANT (1)...(18): Xaa = Any Amino Acid
CCEXXYCCXXNPACTGCY

SEQ ID NO: 681 - protein, 18 aa, Artificial Sequence
  Synthetically generated peptide
  VARIANT (1)...(18): Xaa = Any Amino Acid
CCEXXYCCXNXPACTGCY

SEQ ID NO: 682 - protein, 18 aa, Artificial Sequence
  Synthetically generated peptide
  VARIANT (1)...(18): Xaa = Any Amino Acid
CCEXXYCCXNPXACTGCY

SEQ ID NO: 683 - protein, 18 aa, Artificial Sequence
  Synthetically generated peptide
  VARIANT (1)...(18): Xaa = Any Amino Acid
CCEXXYCCXNPAXCTGCY

SEQ ID NO: 684 - protein, 18 aa, Artificial Sequence
  Synthetically generated peptide
  VARIANT (1)...(18): Xaa = Any Amino Acid
CCEXXYCCXNPACXTGCY

SEQ ID NO: 685 - protein, 18 aa, Artificial Sequence
  Synthetically generated peptide
  VARIANT (1)...(18): Xaa = Any Amino Acid
CCEXXYCCXNPACTXGCY

SEQ ID NO: 686 - protein, 18 aa, Artificial Sequence
  Synthetically generated peptide
  VARIANT (1)...(18): Xaa = Any Amino Acid
CCEXXYCCXNPACTGXCY

SEQ ID NO: 687 - protein, 18 aa, Artificial Sequence
  Synthetically generated peptide
  VARIANT (1)...(18): Xaa = Any Amino Acid
CCEXXYCCXNPACTGCXY

SEQ ID NO: 688 - protein, 17 aa, Artificial Sequence
  Synthetically generated peptide
  VARIANT (1)...(17): Xaa = Any Amino Acid
CCEXXYCCNXPACTGCY

SEQ ID NO: 689 - protein, 18 aa, Artificial Sequence
  Synthetically generated peptide
  VARIANT (1)...(18): Xaa = Any Amino Acid
CCEXXYCCNXXPACTGCY

SEQ ID NO: 690 - protein, 18 aa, Artificial Sequence
  Synthetically generated peptide
  VARIANT (1)...(18): Xaa = Any Amino Acid
CCEXXYCCNXPXACTGCY

SEQ ID NO: 691 - protein, 18 aa, Artificial Sequence
  Synthetically generated peptide
  VARIANT (1)...(18): Xaa = Any Amino Acid
CCEXXYCCNXPAXCTGCY

SEQ ID NO: 692 - protein, 18 aa, Artificial Sequence
  Synthetically generated peptide
  VARIANT (1)...(18): Xaa = Any Amino Acid
CCEXXYCCNXPACXTGCY

SEQ ID NO: 693 - protein, 18 aa, Artificial Sequence
  Synthetically generated peptide
  VARIANT (1)...(18): Xaa = Any Amino Acid
CCEXXYCCNXPACTXGCY

SEQ ID NO: 694 - protein, 18 aa, Artificial Sequence
  Synthetically generated peptide
  VARIANT (1)...(18): Xaa = Any Amino Acid
CCEXXYCCNXPACTGXCY

SEQ ID NO: 695 - protein, 18 aa, Artificial Sequence
  Synthetically generated peptide
  VARIANT (1)...(18): Xaa = Any Amino Acid
CCEXXYCCNXPACTGCXY

SEQ ID NO: 696 - protein, 17 aa, Artificial Sequence
  Synthetically generated peptide
  VARIANT (1)...(17): Xaa = Any Amino Acid
CCEXXYCCNPXACTGCY

SEQ ID NO: 697 - protein, 18 aa, Artificial Sequence
  Synthetically generated peptide
  VARIANT (1)...(18): Xaa = Any Amino Acid
CCEXXYCCNPXXACTGCY

SEQ ID NO: 698 - protein, 18 aa, Artificial Sequence
  Synthetically generated peptide
  VARIANT (1)...(18): Xaa = Any Amino Acid
CCEXXYCCNPXAXCTGCY

SEQ ID NO: 699 - protein, 18 aa, Artificial Sequence
  Synthetically generated peptide
  VARIANT (1)...(18): Xaa = Any Amino Acid
CCEXXYCCNPXACXTGCY

SEQ ID NO: 700 - protein, 18 aa, Artificial Sequence
  Synthetically generated peptide
  VARIANT (1)...(18): Xaa = Any Amino Acid
CCEXXYCCNPXACTXGCY

SEQ ID NO: 701 - protein, 18 aa, Artificial Sequence
  Synthetically generated peptide
  VARIANT (1)...(18): Xaa = Any Amino Acid
CCEXXYCCNPXACTGXCY

SEQ ID NO: 702 - protein, 18 aa, Artificial Sequence
  Synthetically generated peptide
  VARIANT (1)...(18): Xaa = Any Amino Acid
CCEXXYCCNPXACTGCXY

SEQ ID NO: 703 - protein, 17 aa, Artificial Sequence
  Synthetically generated peptide
  VARIANT (1)...(17): Xaa = Any Amino Acid
CCEXXYCCNPAXCTGCY

SEQ ID NO: 704 - protein, 18 aa, Artificial Sequence
  Synthetically generated peptide
  VARIANT (1)...(18): Xaa = Any Amino Acid
CCEXXYCCNPAXXCTGCY

SEQ ID NO: 705 - protein, 18 aa, Artificial Sequence
  Synthetically generated peptide
  VARIANT (1)...(18): Xaa = Any Amino Acid
CCEXXYCCNPAXCXTGCY

SEQ ID NO: 706 - protein, 18 aa, Artificial Sequence
  Synthetically generated peptide
  VARIANT (1)...(18): Xaa = Any Amino Acid
CCEXXYCCNPAXCTXGCY

SEQ ID NO: 707 - protein, 18 aa, Artificial Sequence
  Synthetically generated peptide
  VARIANT (1)...(18): Xaa = Any Amino Acid
CCEXXYCCNPAXCTGXCY

SEQ ID NO: 708 - protein, 18 aa, Artificial Sequence
  Synthetically generated peptide
  VARIANT (1)...(18): Xaa = Any Amino Acid
CCEXXYCCNPAXCTGCXY

SEQ ID NO: 709 - protein, 17 aa, Artificial Sequence
  Synthetically generated peptide
  VARIANT (1)...(17): Xaa = Any Amino Acid
CCEXXYCCNPACXTGCY

SEQ ID NO: 710 - protein, 18 aa, Artificial Sequence
  Synthetically generated peptide
  VARIANT (1)...(18): Xaa = Any Amino Acid
CCEXXYCCNPACXXTGCY

SEQ ID NO: 711 - protein, 18 aa, Artificial Sequence
  Synthetically generated peptide
  VARIANT (1)...(18): Xaa = Any Amino Acid
CCEXXYCCNPACXTXGCY

SEQ ID NO: 712 - protein, 18 aa, Artificial Sequence
  Synthetically generated peptide
  VARIANT (1)...(18): Xaa = Any Amino Acid
CCEXXYCCNPACXTGXCY

SEQ ID NO: 713 - protein, 18 aa, Artificial Sequence
  Synthetically generated peptide
  VARIANT (1)...(18): Xaa = Any Amino Acid
CCEXXYCCNPACXTGCXY

SEQ ID NO: 714 - protein, 17 aa, Artificial Sequence
  Synthetically generated peptide
  VARIANT (1)...(17): Xaa = Any Amino Acid
CCEXXYCCNPACTXGCY

SEQ ID NO: 715 - protein, 18 aa, Artificial Sequence
  Synthetically generated peptide
  VARIANT (1)...(18): Xaa = Any Amino Acid
CCEXXYCCNPACTXXGCY

SEQ ID NO: 716 - protein, 18 aa, Artificial Sequence
  Synthetically generated peptide
  VARIANT (1)...(18): Xaa = Any Amino Acid
CCEXXYCCNPACTXGXCY

SEQ ID NO: 717 - protein, 18 aa, Artificial Sequence
  Synthetically generated peptide
  VARIANT (1)...(18): Xaa = Any Amino Acid
CCEXXYCCNPACTXGCXY

SEQ ID NO: 718 - protein, 17 aa, Artificial Sequence
  Synthetically generated peptide
  VARIANT (1)...(17): Xaa = Any Amino Acid
CCEXXYCCNPACTGXCY

SEQ ID NO: 719 - protein, 18 aa, Artificial Sequence
  Synthetically generated peptide
  VARIANT (1)...(18): Xaa = Any Amino Acid
CCEXXYCCNPACTGXXCY

SEQ ID NO: 720 - protein, 18 aa, Artificial Sequence
  Synthetically generated peptide
  VARIANT (1)...(18): Xaa = Any Amino Acid
CCEXXYCCNPACTGXCXY

SEQ ID NO: 721 - protein, 17 aa, Artificial Sequence
  Synthetically generated peptide
  VARIANT (1)...(17): Xaa = Any Amino Acid
CCEXXYCCNPACTGCXY

SEQ ID NO: 722 - protein, 18 aa, Artificial Sequence
  Synthetically generated peptide
  VARIANT (1)...(18): Xaa = Any Amino Acid
CCEXXYCCNPACTGCXXY

SEQ ID NO: 723 - protein, 16 aa, Artificial Sequence
  Synthetically generated peptide
  VARIANT (1)...(16): Xaa = Any Amino Acid
  VARIANT (1)...(16): Xaa = Any Amino Acid
CCEXYXCCNPACTGCY

SEQ ID NO: 724 - protein, 17 aa, Artificial Sequence
  Synthetically generated peptide
  VARIANT (1)...(17): Xaa = Any Amino Acid
CCEXYXXCCNPACTGCY

SEQ ID NO: 725 - protein, 18 aa, Artificial Sequence
  Synthetically generated peptide
  VARIANT (1)...(18): Xaa = Any Amino Acid
CCEXYXXXCCNPACTGCY

SEQ ID NO: 726 - protein, 18 aa, Artificial Sequence
  Synthetically generated peptide
  VARIANT (1)...(18): Xaa = Any Amino Acid
CCEXYXXCCXNPACTGCY

SEQ ID NO: 727 - protein, 18 aa, Artificial Sequence
  Synthetically generated peptide
  VARIANT (1)...(18): Xaa = Any Amino Acid
CCEXYXXCCNXPACTGCY

SEQ ID NO: 728 - protein, 18 aa, Artificial Sequence
  Synthetically generated peptide
  VARIANT (1)...(18): Xaa = Any Amino Acid
CCEXYXXCCNPXACTGCY

SEQ ID NO: 729 - protein, 18 aa, Artificial Sequence
  Synthetically generated peptide
  VARIANT (1)...(18): Xaa = Any Amino Acid
CCEXYXXCCNPAXCTGCY

SEQ ID NO: 730 - protein, 18 aa, Artificial Sequence
  Synthetically generated peptide
  VARIANT (1)...(18): Xaa = Any Amino Acid
CCEXYXXCCNPACXTGCY

SEQ ID NO: 731 - protein, 18 aa, Artificial Sequence
  Synthetically generated peptide
  VARIANT (1)...(18): Xaa = Any Amino Acid
CCEXYXXCCNPACTXGCY

SEQ ID NO: 732 - protein, 18 aa, Artificial Sequence
  Synthetically generated peptide
  VARIANT (1)...(18): Xaa = Any Amino Acid
CCEXYXXCCNPACTGXCY

SEQ ID NO: 733 - protein, 18 aa, Artificial Sequence
  Synthetically generated peptide
  VARIANT (1)...(18): Xaa = Any Amino Acid
CCEXYXXCCNPACTGCXY

SEQ ID NO: 734 - protein, 17 aa, Artificial Sequence
  Synthetically generated peptide
  VARIANT (1)...(17): Xaa = Any Amino Acid
CCEXYXCCXNPACTGCY

SEQ ID NO: 735 - protein, 18 aa, Artificial Sequence
  Synthetically generated peptide
  VARIANT (1)...(18): Xaa = Any Amino Acid
CCEXYXCCXXNPACTGCY

SEQ ID NO: 736 - protein, 18 aa, Artificial Sequence
  Synthetically generated peptide
  VARIANT (1)...(18): Xaa = Any Amino Acid
CCEXYXCCXNXPACTGCY

SEQ ID NO: 737 - protein, 18 aa, Artificial Sequence
  Synthetically generated peptide
  VARIANT (1)...(18): Xaa = Any Amino Acid
CCEXYXCCXNPXACTGCY

SEQ ID NO: 738 - protein, 18 aa, Artificial Sequence
  Synthetically generated peptide
  VARIANT (1)...(18): Xaa = Any Amino Acid
CCEXYXCCXNPAXCTGCY

SEQ ID NO: 739 - protein, 18 aa, Artificial Sequence
  Synthetically generated peptide
  VARIANT (1)...(18): Xaa = Any Amino Acid
CCEXYXCCXNPACXTGCY

SEQ ID NO: 740 - protein, 18 aa, Artificial Sequence
  Synthetically generated peptide
  VARIANT (1)...(18): Xaa = Any Amino Acid
CCEXYXCCXNPACTXGCY

SEQ ID NO: 741 - protein, 18 aa, Artificial Sequence
  Synthetically generated peptide
  VARIANT (1)...(18): Xaa = Any Amino Acid
CCEXYXCCXNPACTGXCY

SEQ ID NO: 742 - protein, 18 aa, Artificial Sequence
  Synthetically generated peptide
  VARIANT (1)...(18): Xaa = Any Amino Acid
CCEXYXCCXNPACTGCXY

SEQ ID NO: 743 - protein, 17 aa, Artificial Sequence
  Synthetically generated peptide
  VARIANT (1)...(17): Xaa = Any Amino Acid
CCEXYXCCNXPACTGCY

SEQ ID NO: 744 - protein, 18 aa, Artificial Sequence
  Synthetically generated peptide
  VARIANT (1)...(18): Xaa = Any Amino Acid
CCEXYXCCNXXPACTGCY

SEQ ID NO: 745 - protein, 18 aa, Artificial Sequence
  Synthetically generated peptide
  VARIANT (1)...(18): Xaa = Any Amino Acid
CCEXYXCCNXPXACTGCY

SEQ ID NO: 746 - protein, 18 aa, Artificial Sequence
  Synthetically generated peptide
  VARIANT (1)...(18): Xaa = Any Amino Acid
CCEXYXCCNXPAXCTGCY

SEQ ID NO: 747 - protein, 18 aa, Artificial Sequence
  Synthetically generated peptide
  VARIANT (1)...(18): Xaa = Any Amino Acid
CCEXYXCCNXPACXTGCY

SEQ ID NO: 748 - protein, 18 aa, Artificial Sequence
  Synthetically generated peptide
  VARIANT (1)...(18): Xaa = Any Amino Acid
CCEXYXCCNXPACTXGCY

SEQ ID NO: 749 - protein, 18 aa, Artificial Sequence
  Synthetically generated peptide
  VARIANT (1)...(18): Xaa = Any Amino Acid
CCEXYXCCNXPACTGXCY

SEQ ID NO: 750 - protein, 18 aa, Artificial Sequence
  Synthetically generated peptide
  VARIANT (1)...(18): Xaa = Any Amino Acid
CCEXYXCCNXPACTGCXY

SEQ ID NO: 751 - protein, 17 aa, Artificial Sequence
  Synthetically generated peptide
  VARIANT (1)...(17): Xaa = Any Amino Acid
CCEXYXCCNPXACTGCY

SEQ ID NO: 752 - protein, 18 aa, Artificial Sequence
  Synthetically generated peptide
  VARIANT (1)...(18): Xaa = Any Amino Acid
CCEXYXCCNPXXACTGCY

SEQ ID NO: 753 - protein, 18 aa, Artificial Sequence
  Synthetically generated peptide
  VARIANT (1)...(18): Xaa = Any Amino Acid
CCEXYXCCNPXAXCTGCY

SEQ ID NO: 754 - protein, 18 aa, Artificial Sequence
  Synthetically generated peptide
  VARIANT (1)...(18): Xaa = Any Amino Acid
CCEXYXCCNPXACXTGCY

SEQ ID NO: 755 - protein, 18 aa, Artificial Sequence
  Synthetically generated peptide
  VARIANT (1)...(18): Xaa = Any Amino Acid
CCEXYXCCNPXACTXGCY

SEQ ID NO: 756 - protein, 18 aa, Artificial Sequence
  Synthetically generated peptide
  VARIANT (1)...(18): Xaa = Any Amino Acid
CCEXYXCCNPXACTGXCY

SEQ ID NO: 757 - protein, 18 aa, Artificial Sequence
  Synthetically generated peptide
  VARIANT (1)...(18): Xaa = Any Amino Acid
CCEXYXCCNPXACTGCXY

SEQ ID NO: 758 - protein, 17 aa, Artificial Sequence
  Synthetically generated peptide
  VARIANT (1)...(17): Xaa = Any Amino Acid
CCEXYXCCNPAXCTGCY

SEQ ID NO: 759 - protein, 18 aa, Artificial Sequence
  Synthetically generated peptide
  VARIANT (1)...(18): Xaa = Any Amino Acid
CCEXYXCCNPAXXCTGCY

SEQ ID NO: 760 - protein, 18 aa, Artificial Sequence
  Synthetically generated peptide
  VARIANT (1)...(18): Xaa = Any Amino Acid
CCEXYXCCNPAXCXTGCY

SEQ ID NO: 761 - protein, 18 aa, Artificial Sequence
  Synthetically generated peptide
  VARIANT (1)...(18): Xaa = Any Amino Acid
CCEXYXCCNPAXCTXGCY

SEQ ID NO: 762 - protein, 18 aa, Artificial Sequence
  Synthetically generated peptide
  VARIANT (1)...(18): Xaa = Any Amino Acid
CCEXYXCCNPAXCTGXCY

SEQ ID NO: 763 - protein, 18 aa, Artificial Sequence
  Synthetically generated peptide
  VARIANT (1)...(18): Xaa = Any Amino Acid
CCEXYXCCNPAXCTGCXY

SEQ ID NO: 764 - protein, 17 aa, Artificial Sequence
  Synthetically generated peptide
  VARIANT (1)...(17): Xaa = Any Amino Acid
CCEXYXCCNPACXTGCY

SEQ ID NO: 765 - protein, 18 aa, Artificial Sequence
  Synthetically generated peptide
  VARIANT (1)...(18): Xaa = Any Amino Acid
CCEXYXCCNPACXXTGCY

SEQ ID NO: 766 - protein, 18 aa, Artificial Sequence
  Synthetically generated peptide
  VARIANT (1)...(18): Xaa = Any Amino Acid
CCEXYXCCNPACXTXGCY

SEQ ID NO: 767 - protein, 18 aa, Artificial Sequence
  Synthetically generated peptide
  VARIANT (1)...(18): Xaa = Any Amino Acid
CCEXYXCCNPACXTGXCY

SEQ ID NO: 768 - protein, 18 aa, Artificial Sequence
  Synthetically generated peptide
  VARIANT (1)...(18): Xaa = Any Amino Acid
CCEXYXCCNPACXTGCXY

SEQ ID NO: 769 - protein, 17 aa, Artificial Sequence
  Synthetically generated peptide
  VARIANT (1)...(17): Xaa = Any Amino Acid
CCEXYXCCNPACTXGCY

SEQ ID NO: 770 - protein, 18 aa, Artificial Sequence
  Synthetically generated peptide
  VARIANT (1)...(18): Xaa = Any Amino Acid
CCEXYXCCNPACTXXGCY

SEQ ID NO: 771 - protein, 18 aa, Artificial Sequence
  Synthetically generated peptide
  VARIANT (1)...(18): Xaa = Any Amino Acid
CCEXYXCCNPACTXGXCY

SEQ ID NO: 772 - protein, 18 aa, Artificial Sequence
  Synthetically generated peptide
  VARIANT (1)...(18): Xaa = Any Amino Acid
CCEXYXCCNPACTXGCXY

SEQ ID NO: 773 - protein, 17 aa, Artificial Sequence
  Synthetically generated peptide
  VARIANT (1)...(17): Xaa = Any Amino Acid
CCEXYXCCNPACTGXCY

SEQ ID NO: 774 - protein, 18 aa, Artificial Sequence
  Synthetically generated peptide
  VARIANT (1)...(18): Xaa = Any Amino Acid
CCEXYXCCNPACTGXXCY

SEQ ID NO: 775 - protein, 18 aa, Artificial Sequence
  Synthetically generated peptide
  VARIANT (1)...(18): Xaa = Any Amino Acid
CCEXYXCCNPACTGXCXY

SEQ ID NO: 776 - protein, 17 aa, Artificial Sequence
  Synthetically generated peptide
  VARIANT (1)...(17): Xaa = Any Amino Acid
CCEXYXCCNPACTGCXY

SEQ ID NO: 777 - protein, 18 aa, Artificial Sequence
  Synthetically generated peptide
  VARIANT (1)...(18): Xaa = Any Amino Acid
CCEXYXCCNPACTGCXXY

SEQ ID NO: 778 - protein, 16 aa, Artificial Sequence
  Synthetically generated peptide
  VARIANT (1)...(16): Xaa = Any Amino Acid
  VARIANT (1)...(16): Xaa = Any Amino Acid
CCEXYCCXNPACTGCY

SEQ ID NO: 779 - protein, 17 aa, Artificial Sequence
  Synthetically generated peptide
  VARIANT (1)...(17): Xaa = Any Amino Acid
CCEXYCCXXNPACTGCY

SEQ ID NO: 780 - protein, 18 aa, Artificial Sequence
  Synthetically generated peptide
  VARIANT (1)...(18): Xaa = Any Amino Acid
CCEXYCCXXXNPACTGCY

SEQ ID NO: 781 - protein, 18 aa, Artificial Sequence
  Synthetically generated peptide
  VARIANT (1)...(18): Xaa = Any Amino Acid
CCEXYCCXXNXPACTGCY

SEQ ID NO: 782 - protein, 18 aa, Artificial Sequence
  Synthetically generated peptide
  VARIANT (1)...(18): Xaa = Any Amino Acid
CCEXYCCXXNPXACTGCY

SEQ ID NO: 783 - protein, 18 aa, Artificial Sequence
  Synthetically generated peptide
  VARIANT (1)...(18): Xaa = Any Amino Acid
CCEXYCCXXNPAXCTGCY

SEQ ID NO: 784 - protein, 18 aa, Artificial Sequence
  Synthetically generated peptide
  VARIANT (1)...(18): Xaa = Any Amino Acid
CCEXYCCXXNPACXTGCY

SEQ ID NO: 785 - protein, 18 aa, Artificial Sequence
  Synthetically generated peptide
  VARIANT (1)...(18): Xaa = Any Amino Acid
CCEXYCCXXNPACTXGCY

SEQ ID NO: 786 - protein, 18 aa, Artificial Sequence
  Synthetically generated peptide
  VARIANT (1)...(18): Xaa = Any Amino Acid
CCEXYCCXXNPACTGXCY

SEQ ID NO: 787 - protein, 18 aa, Artificial Sequence
  Synthetically generated peptide
  VARIANT (1)...(18): Xaa = Any Amino Acid
CCEXYCCXXNPACTGCXY

SEQ ID NO: 788 - protein, 17 aa, Artificial Sequence
  Synthetically generated peptide
  VARIANT (1)...(17): Xaa = Any Amino Acid
CCEXYCCXNXPACTGCY

SEQ ID NO: 789 - protein, 18 aa, Artificial Sequence
  Synthetically generated peptide
  VARIANT (1)...(18): Xaa = Any Amino Acid
CCEXYCCXNXXPACTGCY

SEQ ID NO: 790 - protein, 18 aa, Artificial Sequence
  Synthetically generated peptide
  VARIANT (1)...(18): Xaa = Any Amino Acid
CCEXYCCXNXPXACTGCY

SEQ ID NO: 791 - protein, 18 aa, Artificial Sequence
  Synthetically generated peptide
  VARIANT (1)...(18): Xaa = Any Amino Acid
CCEXYCCXNXPAXCTGCY

SEQ ID NO: 792 - protein, 18 aa, Artificial Sequence
  Synthetically generated peptide
  VARIANT (1)...(18): Xaa = Any Amino Acid
CCEXYCCXNXPACXTGCY

SEQ ID NO: 793 - protein, 18 aa, Artificial Sequence
  Synthetically generated peptide
  VARIANT (1)...(18): Xaa = Any Amino Acid
CCEXYCCXNXPACTXGCY

SEQ ID NO: 794 - protein, 18 aa, Artificial Sequence
  Synthetically generated peptide
  VARIANT (1)...(18): Xaa = Any Amino Acid
CCEXYCCXNXPACTGXCY

SEQ ID NO: 795 - protein, 18 aa, Artificial Sequence
  Synthetically generated peptide
  VARIANT (1)...(18): Xaa = Any Amino Acid
CCEXYCCXNXPACTGCXY

SEQ ID NO: 796 - protein, 17 aa, Artificial Sequence
  Synthetically generated peptide
  VARIANT (1)...(17): Xaa = Any Amino Acid
CCEXYCCXNPXACTGCY

SEQ ID NO: 797 - protein, 18 aa, Artificial Sequence
  Synthetically generated peptide
  VARIANT (1)...(18): Xaa = Any Amino Acid
CCEXYCCXNPXXACTGCY

SEQ ID NO: 798 - protein, 18 aa, Artificial Sequence
  Synthetically generated peptide
  VARIANT (1)...(18): Xaa = Any Amino Acid
CCEXYCCXNPXAXCTGCY

SEQ ID NO: 799 - protein, 18 aa, Artificial Sequence
  Synthetically generated peptide
  VARIANT (1)...(18): Xaa = Any Amino Acid
CCEXYCCXNPXACXTGCY

SEQ ID NO: 800 - protein, 18 aa, Artificial Sequence
  Synthetically generated peptide
  VARIANT (1)...(18): Xaa = Any Amino Acid
CCEXYCCXNPXACTXGCY

SEQ ID NO: 801 - protein, 18 aa, Artificial Sequence
  Synthetically generated peptide
  VARIANT (1)...(18): Xaa = Any Amino Acid
CCEXYCCXNPXACTGXCY

SEQ ID NO: 802 - protein, 18 aa, Artificial Sequence
  Synthetically generated peptide
  VARIANT (1)...(18): Xaa = Any Amino Acid
CCEXYCCXNPXACTGCXY

SEQ ID NO: 803 - protein, 17 aa, Artificial Sequence
  Synthetically generated peptide
  VARIANT (1)...(17): Xaa = Any Amino Acid
CCEXYCCXNPAXCTGCY

SEQ ID NO: 804 - protein, 18 aa, Artificial Sequence
  Synthetically generated peptide
  VARIANT (1)...(18): Xaa = Any Amino Acid
CCEXYCCXNPAXXCTGCY

SEQ ID NO: 805 - protein, 18 aa, Artificial Sequence
  Synthetically generated peptide
  VARIANT (1)...(18): Xaa = Any Amino Acid
CCEXYCCXNPAXCXTGCY

SEQ ID NO: 806 - protein, 18 aa, Artificial Sequence
  Synthetically generated peptide
  VARIANT (1)...(18): Xaa = Any Amino Acid
CCEXYCCXNPAXCTXGCY

SEQ ID NO: 807 - protein, 18 aa, Artificial Sequence
  Synthetically generated peptide
  VARIANT (1)...(18): Xaa = Any Amino Acid
CCEXYCCXNPAXCTGXCY

SEQ ID NO: 808 - protein, 18 aa, Artificial Sequence
  Synthetically generated peptide
  VARIANT (1)...(18): Xaa = Any Amino Acid
CCEXYCCXNPAXCTGCXY

SEQ ID NO: 809 - protein, 17 aa, Artificial Sequence
  Synthetically generated peptide
  VARIANT (1)...(17): Xaa = Any Amino Acid
CCEXYCCXNPACXTGCY

SEQ ID NO: 810 - protein, 18 aa, Artificial Sequence
  Synthetically generated peptide
  VARIANT (1)...(18): Xaa = Any Amino Acid
CCEXYCCXNPACXXTGCY

SEQ ID NO: 811 - protein, 18 aa, Artificial Sequence
  Synthetically generated peptide
  VARIANT (1)...(18): Xaa = Any Amino Acid
CCEXYCCXNPACXTXGCY

SEQ ID NO: 812 - protein, 18 aa, Artificial Sequence
  Synthetically generated peptide
  VARIANT (1)...(18): Xaa = Any Amino Acid
CCEXYCCXNPACXTGXCY

SEQ ID NO: 813 - protein, 18 aa, Artificial Sequence
  Synthetically generated peptide
  VARIANT (1)...(18): Xaa = Any Amino Acid
CCEXYCCXNPACXTGCXY

SEQ ID NO: 814 - protein, 17 aa, Artificial Sequence
  Synthetically generated peptide
  VARIANT (1)...(17): Xaa = Any Amino Acid
CCEXYCCXNPACTXGCY

SEQ ID NO: 815 - protein, 18 aa, Artificial Sequence
  Synthetically generated peptide
  VARIANT (1)...(18): Xaa = Any Amino Acid
CCEXYCCXNPACTXXGCY

SEQ ID NO: 816 - protein, 18 aa, Artificial Sequence
  Synthetically generated peptide
  VARIANT (1)...(18): Xaa = Any Amino Acid
CCEXYCCXNPACTXGXCY

SEQ ID NO: 817 - protein, 18 aa, Artificial Sequence
  Synthetically generated peptide
  VARIANT (1)...(18): Xaa = Any Amino Acid
CCEXYCCXNPACTXGCXY

SEQ ID NO: 818 - protein, 17 aa, Artificial Sequence
  Synthetically generated peptide
  VARIANT (1)...(17): Xaa = Any Amino Acid
CCEXYCCXNPACTGXCY

SEQ ID NO: 819 - protein, 18 aa, Artificial Sequence
  Synthetically generated peptide
  VARIANT (1)...(18): Xaa = Any Amino Acid
CCEXYCCXNPACTGXXCY

SEQ ID NO: 820 - protein, 18 aa, Artificial Sequence
  Synthetically generated peptide
  VARIANT (1)...(18): Xaa = Any Amino Acid
CCEXYCCXNPACTGXCXY

SEQ ID NO: 821 - protein, 17 aa, Artificial Sequence
  Synthetically generated peptide
  VARIANT (1)...(17): Xaa = Any Amino Acid
CCEXYCCXNPACTGCXY

SEQ ID NO: 822 - protein, 18 aa, Artificial Sequence
  Synthetically generated peptide
  VARIANT (1)...(18): Xaa = Any Amino Acid
CCEXYCCXNPACTGCXXY

SEQ ID NO: 823 - protein, 16 aa, Artificial Sequence
  Synthetically generated peptide
  VARIANT (1)...(16): Xaa = Any Amino Acid
  VARIANT (1)...(16): Xaa = Any Amino Acid
CCEXYCCNXPACTGCY

SEQ ID NO: 824 - protein, 17 aa, Artificial Sequence
  Synthetically generated peptide
  VARIANT (1)...(17): Xaa = Any Amino Acid
CCEXYCCNXXPACTGCY

SEQ ID NO: 825 - protein, 18 aa, Artificial Sequence
  Synthetically generated peptide
  VARIANT (1)...(18): Xaa = Any Amino Acid
CCEXYCCNXXXPACTGCY

SEQ ID NO: 826 - protein, 18 aa, Artificial Sequence
  Synthetically generated peptide
  VARIANT (1)...(18): Xaa = Any Amino Acid
CCEXYCCNXXPXACTGCY

SEQ ID NO: 827 - protein, 18 aa, Artificial Sequence
  Synthetically generated peptide
  VARIANT (1)...(18): Xaa = Any Amino Acid
CCEXYCCNXXPAXCTGCY

SEQ ID NO: 828 - protein, 18 aa, Artificial Sequence
  Synthetically generated peptide
  VARIANT (1)...(18): Xaa = Any Amino Acid
CCEXYCCNXXPACXTGCY

SEQ ID NO: 829 - protein, 18 aa, Artificial Sequence
  Synthetically generated peptide
  VARIANT (1)...(18): Xaa = Any Amino Acid
CCEXYCCNXXPACTXGCY

SEQ ID NO: 830 - protein, 18 aa, Artificial Sequence
  Synthetically generated peptide
  VARIANT (1)...(18): Xaa = Any Amino Acid
CCEXYCCNXXPACTGXCY

SEQ ID NO: 831 - protein, 18 aa, Artificial Sequence
  Synthetically generated peptide
  VARIANT (1)...(18): Xaa = Any Amino Acid
CCEXYCCNXXPACTGCXY

SEQ ID NO: 832 - protein, 17 aa, Artificial Sequence
  Synthetically generated peptide
  VARIANT (1)...(17): Xaa = Any Amino Acid
CCEXYCCNXPXACTGCY

SEQ ID NO: 833 - protein, 18 aa, Artificial Sequence
  Synthetically generated peptide
  VARIANT (1)...(18): Xaa = Any Amino Acid
CCEXYCCNXPXXACTGCY

SEQ ID NO: 834 - protein, 18 aa, Artificial Sequence
  Synthetically generated peptide
  VARIANT (1)...(18): Xaa = Any Amino Acid
CCEXYCCNXPXAXCTGCY

SEQ ID NO: 835 - protein, 18 aa, Artificial Sequence
  Synthetically generated peptide
  VARIANT (1)...(18): Xaa = Any Amino Acid
CCEXYCCNXPXACXTGCY

SEQ ID NO: 836 - protein, 18 aa, Artificial Sequence
  Synthetically generated peptide
  VARIANT (1)...(18): Xaa = Any Amino Acid
CCEXYCCNXPXACTXGCY

SEQ ID NO: 837 - protein, 18 aa, Artificial Sequence
  Synthetically generated peptide
  VARIANT (1)...(18): Xaa = Any Amino Acid
CCEXYCCNXPXACTGXCY

SEQ ID NO: 838 - protein, 18 aa, Artificial Sequence
  Synthetically generated peptide
  VARIANT (1)...(18): Xaa = Any Amino Acid
CCEXYCCNXPXACTGCXY

SEQ ID NO: 839 - protein, 17 aa, Artificial Sequence
  Synthetically generated peptide
  VARIANT (1)...(17): Xaa = Any Amino Acid
CCEXYCCNXPAXCTGCY

SEQ ID NO: 840 - protein, 18 aa, Artificial Sequence
  Synthetically generated peptide
  VARIANT (1)...(18): Xaa = Any Amino Acid
CCEXYCCNXPAXXCTGCY

SEQ ID NO: 841 - protein, 18 aa, Artificial Sequence
  Synthetically generated peptide
  VARIANT (1)...(18): Xaa = Any Amino Acid
CCEXYCCNXPAXCXTGCY

SEQ ID NO: 842 - protein, 18 aa, Artificial Sequence
  Synthetically generated peptide
  VARIANT (1)...(18): Xaa = Any Amino Acid
CCEXYCCNXPAXCTXGCY

SEQ ID NO: 843 - protein, 18 aa, Artificial Sequence
  Synthetically generated peptide
  VARIANT (1)...(18): Xaa = Any Amino Acid
CCEXYCCNXPAXCTGXCY

SEQ ID NO: 844 - protein, 18 aa, Artificial Sequence
  Synthetically generated peptide
  VARIANT (1)...(18): Xaa = Any Amino Acid
CCEXYCCNXPAXCTGCXY

SEQ ID NO: 845 - protein, 17 aa, Artificial Sequence
  Synthetically generated peptide
  VARIANT (1)...(17): Xaa = Any Amino Acid
CCEXYCCNXPACXTGCY

SEQ ID NO: 846 - protein, 18 aa, Artificial Sequence
  Synthetically generated peptide
  VARIANT (1)...(18): Xaa = Any Amino Acid
CCEXYCCNXPACXXTGCY

SEQ ID NO: 847 - protein, 18 aa, Artificial Sequence
  Synthetically generated peptide
  VARIANT (1)...(18): Xaa = Any Amino Acid
CCEXYCCNXPACXTXGCY

SEQ ID NO: 848 - protein, 18 aa, Artificial Sequence
  Synthetically generated peptide
  VARIANT (1)...(18): Xaa = Any Amino Acid
CCEXYCCNXPACXTGXCY

SEQ ID NO: 849 - protein, 18 aa, Artificial Sequence
  Synthetically generated peptide
  VARIANT (1)...(18): Xaa = Any Amino Acid
CCEXYCCNXPACXTGCXY

SEQ ID NO: 850 - protein, 17 aa, Artificial Sequence
  Synthetically generated peptide
  VARIANT (1)...(17): Xaa = Any Amino Acid
CCEXYCCNXPACTXGCY

SEQ ID NO: 851 - protein, 18 aa, Artificial Sequence
  Synthetically generated peptide
  VARIANT (1)...(18): Xaa = Any Amino Acid
CCEXYCCNXPACTXXGCY

SEQ ID NO: 852 - protein, 18 aa, Artificial Sequence
  Synthetically generated peptide
  VARIANT (1)...(18): Xaa = Any Amino Acid
CCEXYCCNXPACTXGXCY

SEQ ID NO: 853 - protein, 18 aa, Artificial Sequence
  Synthetically generated peptide
  VARIANT (1)...(18): Xaa = Any Amino Acid
CCEXYCCNXPACTXGCXY

SEQ ID NO: 854 - protein, 17 aa, Artificial Sequence
  Synthetically generated peptide
  VARIANT (1)...(17): Xaa = Any Amino Acid
CCEXYCCNXPACTGXCY

SEQ ID NO: 855 - protein, 18 aa, Artificial Sequence
  Synthetically generated peptide
  VARIANT (1)...(18): Xaa = Any Amino Acid
CCEXYCCNXPACTGXXCY

SEQ ID NO: 856 - protein, 18 aa, Artificial Sequence
  Synthetically generated peptide
  VARIANT (1)...(18): Xaa = Any Amino Acid
CCEXYCCNXPACTGXCXY

SEQ ID NO: 857 - protein, 17 aa, Artificial Sequence
  Synthetically generated peptide
  VARIANT (1)...(17): Xaa = Any Amino Acid
CCEXYCCNXPACTGCXY

SEQ ID NO: 858 - protein, 18 aa, Artificial Sequence
  Synthetically generated peptide
  VARIANT (1)...(18): Xaa = Any Amino Acid
CCEXYCCNXPACTGCXXY

SEQ ID NO: 859 - protein, 16 aa, Artificial Sequence
  Synthetically generated peptide
  VARIANT (1)...(16): Xaa = Any Amino Acid
  VARIANT (1)...(16): Xaa = Any Amino Acid
CCEXYCCNPXACTGCY

SEQ ID NO: 860 - protein, 17 aa, Artificial Sequence
  Synthetically generated peptide
  VARIANT (1)...(17): Xaa = Any Amino Acid
CCEXYCCNPXXACTGCY

SEQ ID NO: 861 - protein, 18 aa, Artificial Sequence
  Synthetically generated peptide
  VARIANT (1)...(18): Xaa = Any Amino Acid
CCEXYCCNPXXXACTGCY

SEQ ID NO: 862 - protein, 18 aa, Artificial Sequence
  Synthetically generated peptide
  VARIANT (1)...(18): Xaa = Any Amino Acid
CCEXYCCNPXXAXCTGCY

SEQ ID NO: 863 - protein, 18 aa, Artificial Sequence
  Synthetically generated peptide
  VARIANT (1)...(18): Xaa = Any Amino Acid
CCEXYCCNPXXACXTGCY

SEQ ID NO: 864 - protein, 18 aa, Artificial Sequence
  Synthetically generated peptide
  VARIANT (1)...(18): Xaa = Any Amino Acid
CCEXYCCNPXXACTXGCY

SEQ ID NO: 865 - protein, 18 aa, Artificial Sequence
  Synthetically generated peptide
  VARIANT (1)...(18): Xaa = Any Amino Acid
CCEXYCCNPXXACTGXCY

SEQ ID NO: 866 - protein, 18 aa, Artificial Sequence
  Synthetically generated peptide
  VARIANT (1)...(18): Xaa = Any Amino Acid
CCEXYCCNPXXACTGCXY

SEQ ID NO: 867 - protein, 17 aa, Artificial Sequence
  Synthetically generated peptide
  VARIANT (1)...(17): Xaa = Any Amino Acid
CCEXYCCNPXAXCTGCY

SEQ ID NO: 868 - protein, 18 aa, Artificial Sequence
  Synthetically generated peptide
  VARIANT (1)...(18): Xaa = Any Amino Acid
CCEXYCCNPXAXXCTGCY

SEQ ID NO: 869 - protein, 18 aa, Artificial Sequence
  Synthetically generated peptide
  VARIANT (1)...(18): Xaa = Any Amino Acid
CCEXYCCNPXAXCXTGCY

SEQ ID NO: 870 - protein, 18 aa, Artificial Sequence
  Synthetically generated peptide
  VARIANT (1)...(18): Xaa = Any Amino Acid
CCEXYCCNPXAXCTXGCY

SEQ ID NO: 871 - protein, 18 aa, Artificial Sequence
  Synthetically generated peptide
  VARIANT (1)...(18): Xaa = Any Amino Acid
CCEXYCCNPXAXCTGXCY

SEQ ID NO: 872 - protein, 18 aa, Artificial Sequence
  Synthetically generated peptide
  VARIANT (1)...(18): Xaa = Any Amino Acid
CCEXYCCNPXAXCTGCXY

SEQ ID NO: 873 - protein, 17 aa, Artificial Sequence
  Synthetically generated peptide
  VARIANT (1)...(17): Xaa = Any Amino Acid
CCEXYCCNPXACXTGCY

SEQ ID NO: 874 - protein, 18 aa, Artificial Sequence
  Synthetically generated peptide
  VARIANT (1)...(18): Xaa = Any Amino Acid
CCEXYCCNPXACXXTGCY

SEQ ID NO: 875 - protein, 18 aa, Artificial Sequence
  Synthetically generated peptide
  VARIANT (1)...(18): Xaa = Any Amino Acid
CCEXYCCNPXACXTXGCY

SEQ ID NO: 876 - protein, 18 aa, Artificial Sequence
  Synthetically generated peptide
  VARIANT (1)...(18): Xaa = Any Amino Acid
CCEXYCCNPXACXTGXCY

SEQ ID NO: 877 - protein, 18 aa, Artificial Sequence
  Synthetically generated peptide
  VARIANT (1)...(18): Xaa = Any Amino Acid
CCEXYCCNPXACXTGCXY

SEQ ID NO: 878 - protein, 17 aa, Artificial Sequence
  Synthetically generated peptide
  VARIANT (1)...(17): Xaa = Any Amino Acid
CCEXYCCNPXACTXGCY

SEQ ID NO: 879 - protein, 18 aa, Artificial Sequence
  Synthetically generated peptide
  VARIANT (1)...(18): Xaa = Any Amino Acid
CCEXYCCNPXACTXXGCY

SEQ ID NO: 880 - protein, 18 aa, Artificial Sequence
  Synthetically generated peptide
  VARIANT (1)...(18): Xaa = Any Amino Acid
CCEXYCCNPXACTXGXCY

SEQ ID NO: 881 - protein, 18 aa, Artificial Sequence
  Synthetically generated peptide
  VARIANT (1)...(18): Xaa = Any Amino Acid
CCEXYCCNPXACTXGCXY

SEQ ID NO: 882 - protein, 17 aa, Artificial Sequence
  Synthetically generated peptide
  VARIANT (1)...(17): Xaa = Any Amino Acid
CCEXYCCNPXACTGXCY

SEQ ID NO: 883 - protein, 18 aa, Artificial Sequence
  Synthetically generated peptide
  VARIANT (1)...(18): Xaa = Any Amino Acid
CCEXYCCNPXACTGXXCY

SEQ ID NO: 884 - protein, 18 aa, Artificial Sequence
  Synthetically generated peptide
  VARIANT (1)...(18): Xaa = Any Amino Acid
CCEXYCCNPXACTGXCXY

SEQ ID NO: 885 - protein, 17 aa, Artificial Sequence
  Synthetically generated peptide
  VARIANT (1)...(17): Xaa = Any Amino Acid
CCEXYCCNPXACTGCXY

SEQ ID NO: 886 - protein, 18 aa, Artificial Sequence
  Synthetically generated peptide
  VARIANT (1)...(18): Xaa = Any Amino Acid
CCEXYCCNPXACTGCXXY

SEQ ID NO: 887 - protein, 16 aa, Artificial Sequence
  Synthetically generated peptide
  VARIANT (1)...(16): Xaa = Any Amino Acid
  VARIANT (1)...(16): Xaa = Any Amino Acid
CCEXYCCNPAXCTGCY

SEQ ID NO: 888 - protein, 17 aa, Artificial Sequence
  Synthetically generated peptide
  VARIANT (1)...(17): Xaa = Any Amino Acid
CCEXYCCNPAXXCTGCY

SEQ ID NO: 889 - protein, 18 aa, Artificial Sequence
  Synthetically generated peptide
  VARIANT (1)...(18): Xaa = Any Amino Acid
CCEXYCCNPAXXXCTGCY

SEQ ID NO: 890 - protein, 18 aa, Artificial Sequence
  Synthetically generated peptide
  VARIANT (1)...(18): Xaa = Any Amino Acid
CCEXYCCNPAXXCXTGCY

SEQ ID NO: 891 - protein, 18 aa, Artificial Sequence
  Synthetically generated peptide
  VARIANT (1)...(18): Xaa = Any Amino Acid
CCEXYCCNPAXXCTXGCY

SEQ ID NO: 892 - protein, 18 aa, Artificial Sequence
  Synthetically generated peptide
  VARIANT (1)...(18): Xaa = Any Amino Acid
CCEXYCCNPAXXCTGXCY

SEQ ID NO: 893 - protein, 18 aa, Artificial Sequence
  Synthetically generated peptide
  VARIANT (1)...(18): Xaa = Any Amino Acid
CCEXYCCNPAXXCTGCXY

SEQ ID NO: 894 - protein, 17 aa, Artificial Sequence
  Synthetically generated peptide
  VARIANT (1)...(17): Xaa = Any Amino Acid
CCEXYCCNPAXCXTGCY

SEQ ID NO: 895 - protein, 18 aa, Artificial Sequence
  Synthetically generated peptide
  VARIANT (1)...(18): Xaa = Any Amino Acid
CCEXYCCNPAXCXXTGCY

SEQ ID NO: 896 - protein, 18 aa, Artificial Sequence
  Synthetically generated peptide
  VARIANT (1)...(18): Xaa = Any Amino Acid
CCEXYCCNPAXCXTXGCY

SEQ ID NO: 897 - protein, 18 aa, Artificial Sequence
  Synthetically generated peptide
  VARIANT (1)...(18): Xaa = Any Amino Acid
CCEXYCCNPAXCXTGXCY

SEQ ID NO: 898 - protein, 18 aa, Artificial Sequence
  Synthetically generated peptide
  VARIANT (1)...(18): Xaa = Any Amino Acid
CCEXYCCNPAXCXTGCXY

SEQ ID NO: 899 - protein, 17 aa, Artificial Sequence
  Synthetically generated peptide
  VARIANT (1)...(17): Xaa = Any Amino Acid
CCEXYCCNPAXCTXGCY

SEQ ID NO: 900 - protein, 18 aa, Artificial Sequence
  Synthetically generated peptide
  VARIANT (1)...(18): Xaa = Any Amino Acid
CCEXYCCNPAXCTXXGCY

SEQ ID NO: 901 - protein, 18 aa, Artificial Sequence
  Synthetically generated peptide
  VARIANT (1)...(18): Xaa = Any Amino Acid
CCEXYCCNPAXCTXGXCY

SEQ ID NO: 902 - protein, 18 aa, Artificial Sequence
  Synthetically generated peptide
  VARIANT (1)...(18): Xaa = Any Amino Acid
CCEXYCCNPAXCTXGCXY

SEQ ID NO: 903 - protein, 17 aa, Artificial Sequence
  Synthetically generated peptide
  VARIANT (1)...(17): Xaa = Any Amino Acid
CCEXYCCNPAXCTGXCY

SEQ ID NO: 904 - protein, 18 aa, Artificial Sequence
  Synthetically generated peptide
  VARIANT (1)...(18): Xaa = Any Amino Acid
CCEXYCCNPAXCTGXXCY

SEQ ID NO: 905 - protein, 18 aa, Artificial Sequence
  Synthetically generated peptide
  VARIANT (1)...(18): Xaa = Any Amino Acid
CCEXYCCNPAXCTGXCXY

SEQ ID NO: 906 - protein, 17 aa, Artificial Sequence
  Synthetically generated peptide
  VARIANT (1)...(17): Xaa = Any Amino Acid
CCEXYCCNPAXCTGCXY

SEQ ID NO: 907 - protein, 18 aa, Artificial Sequence
  Synthetically generated peptide
  VARIANT (1)...(18): Xaa = Any Amino Acid
CCEXYCCNPAXCTGCXXY

SEQ ID NO: 908 - protein, 16 aa, Artificial Sequence
  Synthetically generated peptide
  VARIANT (1)...(16): Xaa = Any Amino Acid
  VARIANT (1)...(16): Xaa = Any Amino Acid
CCEXYCCNPACXTGCY

SEQ ID NO: 909 - protein, 17 aa, Artificial Sequence
  Synthetically generated peptide
  VARIANT (1)...(17): Xaa = Any Amino Acid
CCEXYCCNPACXXTGCY

SEQ ID NO: 910 - protein, 18 aa, Artificial Sequence
  Synthetically generated peptide
  VARIANT (1)...(18): Xaa = Any Amino Acid
CCEXYCCNPACXXXTGCY

SEQ ID NO: 911 - protein, 18 aa, Artificial Sequence
  Synthetically generated peptide
  VARIANT (1)...(18): Xaa = Any Amino Acid
CCEXYCCNPACXXTXGCY

SEQ ID NO: 912 - protein, 18 aa, Artificial Sequence
  Synthetically generated peptide
  VARIANT (1)...(18): Xaa = Any Amino Acid
CCEXYCCNPACXXTGXCY

SEQ ID NO: 913 - protein, 18 aa, Artificial Sequence
  Synthetically generated peptide
  VARIANT (1)...(18): Xaa = Any Amino Acid
CCEXYCCNPACXXTGCXY

SEQ ID NO: 914 - protein, 17 aa, Artificial Sequence
  Synthetically generated peptide
  VARIANT (1)...(17): Xaa = Any Amino Acid
CCEXYCCNPACXTXGCY

SEQ ID NO: 915 - protein, 18 aa, Artificial Sequence
  Synthetically generated peptide
  VARIANT (1)...(18): Xaa = Any Amino Acid
CCEXYCCNPACXTXXGCY

SEQ ID NO: 916 - protein, 18 aa, Artificial Sequence
  Synthetically generated peptide
  VARIANT (1)...(18): Xaa = Any Amino Acid
CCEXYCCNPACXTXGXCY

SEQ ID NO: 917 - protein, 18 aa, Artificial Sequence
  Synthetically generated peptide
  VARIANT (1)...(18): Xaa = Any Amino Acid
CCEXYCCNPACXTXGCXY

SEQ ID NO: 918 - protein, 17 aa, Artificial Sequence
  Synthetically generated peptide
  VARIANT (1)...(17): Xaa = Any Amino Acid
CCEXYCCNPACXTGXCY

SEQ ID NO: 919 - protein, 18 aa, Artificial Sequence
  Synthetically generated peptide
  VARIANT (1)...(18): Xaa = Any Amino Acid
CCEXYCCNPACXTGXXCY

SEQ ID NO: 920 - protein, 18 aa, Artificial Sequence
  Synthetically generated peptide
  VARIANT (1)...(18): Xaa = Any Amino Acid
CCEXYCCNPACXTGXCXY

SEQ ID NO: 921 - protein, 17 aa, Artificial Sequence
  Synthetically generated peptide
  VARIANT (1)...(17): Xaa = Any Amino Acid
CCEXYCCNPACXTGCXY

SEQ ID NO: 922 - protein, 18 aa, Artificial Sequence
  Synthetically generated peptide
  VARIANT (1)...(18): Xaa = Any Amino Acid
CCEXYCCNPACXTGCXXY

SEQ ID NO: 923 - protein, 16 aa, Artificial Sequence
  Synthetically generated peptide
  VARIANT (1)...(16): Xaa = Any Amino Acid
  VARIANT (1)...(16): Xaa = Any Amino Acid
CCEXYCCNPACTXGCY

SEQ ID NO: 924 - protein, 17 aa, Artificial Sequence
  Synthetically generated peptide
  VARIANT (1)...(17): Xaa = Any Amino Acid
CCEXYCCNPACTXXGCY

SEQ ID NO: 925 - protein, 18 aa, Artificial Sequence
  Synthetically generated peptide
  VARIANT (1)...(18): Xaa = Any Amino Acid
CCEXYCCNPACTXXXGCY

SEQ ID NO: 926 - protein, 18 aa, Artificial Sequence
  Synthetically generated peptide
  VARIANT (1)...(18): Xaa = Any Amino Acid
CCEXYCCNPACTXXGXCY

SEQ ID NO: 927 - protein, 18 aa, Artificial Sequence
  Synthetically generated peptide
  VARIANT (1)...(18): Xaa = Any Amino Acid
CCEXYCCNPACTXXGCXY

SEQ ID NO: 928 - protein, 17 aa, Artificial Sequence
  Synthetically generated peptide
  VARIANT (1)...(17): Xaa = Any Amino Acid
CCEXYCCNPACTXGXCY

SEQ ID NO: 929 - protein, 18 aa, Artificial Sequence
  Synthetically generated peptide
  VARIANT (1)...(18): Xaa = Any Amino Acid
CCEXYCCNPACTXGXXCY

SEQ ID NO: 930 - protein, 18 aa, Artificial Sequence
  Synthetically generated peptide
  VARIANT (1)...(18): Xaa = Any Amino Acid
CCEXYCCNPACTXGXCXY

SEQ ID NO: 931 - protein, 17 aa, Artificial Sequence
  Synthetically generated peptide
  VARIANT (1)...(17): Xaa = Any Amino Acid
CCEXYCCNPACTXGCXY

SEQ ID NO: 932 - protein, 18 aa, Artificial Sequence
  Synthetically generated peptide
  VARIANT (1)...(18): Xaa = Any Amino Acid
CCEXYCCNPACTXGCXXY

SEQ ID NO: 933 - protein, 16 aa, Artificial Sequence
  Synthetically generated peptide
  VARIANT (1)...(16): Xaa = Any Amino Acid
  VARIANT (1)...(16): Xaa = Any Amino Acid
CCEXYCCNPACTGXCY

SEQ ID NO: 934 - protein, 17 aa, Artificial Sequence
  Synthetically generated peptide
  VARIANT (1)...(17): Xaa = Any Amino Acid
CCEXYCCNPACTGXXCY

SEQ ID NO: 935 - protein, 18 aa, Artificial Sequence
  Synthetically generated peptide
  VARIANT (1)...(18): Xaa = Any Amino Acid
CCEXYCCNPACTGXXXCY

SEQ ID NO: 936 - protein, 18 aa, Artificial Sequence
  Synthetically generated peptide
  VARIANT (1)...(18): Xaa = Any Amino Acid
CCEXYCCNPACTGXXCXY

SEQ ID NO: 937 - protein, 17 aa, Artificial Sequence
  Synthetically generated peptide
  VARIANT (1)...(17): Xaa = Any Amino Acid
CCEXYCCNPACTGXCXY

SEQ ID NO: 938 - protein, 18 aa, Artificial Sequence
  Synthetically generated peptide
  VARIANT (1)...(18): Xaa = Any Amino Acid
CCEXYCCNPACTGXCXXY

SEQ ID NO: 939 - protein, 16 aa, Artificial Sequence
  Synthetically generated peptide
  VARIANT (1)...(16): Xaa = Any Amino Acid
  VARIANT (1)...(16): Xaa = Any Amino Acid
CCEXYCCNPACTGCXY

SEQ ID NO: 940 - protein, 17 aa, Artificial Sequence
  Synthetically generated peptide
  VARIANT (1)...(17): Xaa = Any Amino Acid
CCEXYCCNPACTGCXXY

SEQ ID NO: 941 - protein, 18 aa, Artificial Sequence
  Synthetically generated peptide
  VARIANT (1)...(18): Xaa = Any Amino Acid
CCEXYCCNPACTGCXXXY

SEQ ID NO: 942 - protein, 15 aa, Artificial Sequence
  Synthetically generated peptide
  VARIANT (1)...(15): Xaa = Any Amino Acid
  VARIANT (1)...(15): Xaa = Any Amino Acid
CCEYXCCNPACTGCY

SEQ ID NO: 943 - protein, 16 aa, Artificial Sequence
  Synthetically generated peptide
  VARIANT (1)...(16): Xaa = Any Amino Acid
  VARIANT (1)...(16): Xaa = Any Amino Acid
CCEYXXCCNPACTGCY

SEQ ID NO: 944 - protein, 17 aa, Artificial Sequence
  Synthetically generated peptide
  VARIANT (1)...(17): Xaa = Any Amino Acid
CCEYXXXCCNPACTGCY

SEQ ID NO: 945 - protein, 18 aa, Artificial Sequence
  Synthetically generated peptide
  VARIANT (1)...(18): Xaa = Any Amino Acid
CCEYXXXXCCNPACTGCY

SEQ ID NO: 946 - protein, 18 aa, Artificial Sequence
  Synthetically generated peptide
  VARIANT (1)...(18): Xaa = Any Amino Acid
CCEYXXXCCXNPACTGCY

SEQ ID NO: 947 - protein, 18 aa, Artificial Sequence
  Synthetically generated peptide
  VARIANT (1)...(18): Xaa = Any Amino Acid
CCEYXXXCCNXPACTGCY

SEQ ID NO: 948 - protein, 18 aa, Artificial Sequence
  Synthetically generated peptide
  VARIANT (1)...(18): Xaa = Any Amino Acid
CCEYXXXCCNPXACTGCY

SEQ ID NO: 949 - protein, 18 aa, Artificial Sequence
  Synthetically generated peptide
  VARIANT (1)...(18): Xaa = Any Amino Acid
CCEYXXXCCNPAXCTGCY

SEQ ID NO: 950 - protein, 18 aa, Artificial Sequence
  Synthetically generated peptide
  VARIANT (1)...(18): Xaa = Any Amino Acid
CCEYXXXCCNPACXTGCY

SEQ ID NO: 951 - protein, 18 aa, Artificial Sequence
  Synthetically generated peptide
  VARIANT (1)...(18): Xaa = Any Amino Acid
CCEYXXXCCNPACTXGCY

SEQ ID NO: 952 - protein, 18 aa, Artificial Sequence
  Synthetically generated peptide
  VARIANT (1)...(18): Xaa = Any Amino Acid
CCEYXXXCCNPACTGXCY

SEQ ID NO: 953 - protein, 18 aa, Artificial Sequence
  Synthetically generated peptide
  VARIANT (1)...(18): Xaa = Any Amino Acid
CCEYXXXCCNPACTGCXY

SEQ ID NO: 954 - protein, 17 aa, Artificial Sequence
  Synthetically generated peptide
  VARIANT (1)...(17): Xaa = Any Amino Acid
CCEYXXCCXNPACTGCY

SEQ ID NO: 955 - protein, 18 aa, Artificial Sequence
  Synthetically generated peptide
  VARIANT (1)...(18): Xaa = Any Amino Acid
CCEYXXCCXXNPACTGCY

SEQ ID NO: 956 - protein, 18 aa, Artificial Sequence
  Synthetically generated peptide
  VARIANT (1)...(18): Xaa = Any Amino Acid
CCEYXXCCXNXPACTGCY

SEQ ID NO: 957 - protein, 18 aa, Artificial Sequence
  Synthetically generated peptide
  VARIANT (1)...(18): Xaa = Any Amino Acid
CCEYXXCCXNPXACTGCY

SEQ ID NO: 958 - protein, 18 aa, Artificial Sequence
  Synthetically generated peptide
  VARIANT (1)...(18): Xaa = Any Amino Acid
CCEYXXCCXNPAXCTGCY

SEQ ID NO: 959 - protein, 18 aa, Artificial Sequence
  Synthetically generated peptide
  VARIANT (1)...(18): Xaa = Any Amino Acid
CCEYXXCCXNPACXTGCY

SEQ ID NO: 960 - protein, 18 aa, Artificial Sequence
  Synthetically generated peptide
  VARIANT (1)...(18): Xaa = Any Amino Acid
CCEYXXCCXNPACTXGCY

SEQ ID NO: 961 - protein, 18 aa, Artificial Sequence
  Synthetically generated peptide
  VARIANT (1)...(18): Xaa = Any Amino Acid
CCEYXXCCXNPACTGXCY

SEQ ID NO: 962 - protein, 18 aa, Artificial Sequence
  Synthetically generated peptide
  VARIANT (1)...(18): Xaa = Any Amino Acid
CCEYXXCCXNPACTGCXY

SEQ ID NO: 963 - protein, 17 aa, Artificial Sequence
  Synthetically generated peptide
  VARIANT (1)...(17): Xaa = Any Amino Acid
CCEYXXCCNXPACTGCY

SEQ ID NO: 964 - protein, 18 aa, Artificial Sequence
  Synthetically generated peptide
  VARIANT (1)...(18): Xaa = Any Amino Acid
CCEYXXCCNXXPACTGCY

SEQ ID NO: 965 - protein, 18 aa, Artificial Sequence
  Synthetically generated peptide
  VARIANT (1)...(18): Xaa = Any Amino Acid
CCEYXXCCNXPXACTGCY

SEQ ID NO: 966 - protein, 18 aa, Artificial Sequence
  Synthetically generated peptide
  VARIANT (1)...(18): Xaa = Any Amino Acid
CCEYXXCCNXPAXCTGCY

SEQ ID NO: 967 - protein, 18 aa, Artificial Sequence
  Synthetically generated peptide
  VARIANT (1)...(18): Xaa = Any Amino Acid
CCEYXXCCNXPACXTGCY

SEQ ID NO: 968 - protein, 18 aa, Artificial Sequence
  Synthetically generated peptide
  VARIANT (1)...(18): Xaa = Any Amino Acid
CCEYXXCCNXPACTXGCY

SEQ ID NO: 969 - protein, 18 aa, Artificial Sequence
  Synthetically generated peptide
  VARIANT (1)...(18): Xaa = Any Amino Acid
CCEYXXCCNXPACTGXCY

SEQ ID NO: 970 - protein, 18 aa, Artificial Sequence
  Synthetically generated peptide
  VARIANT (1)...(18): Xaa = Any Amino Acid
CCEYXXCCNXPACTGCXY

SEQ ID NO: 971 - protein, 17 aa, Artificial Sequence
  Synthetically generated peptide
  VARIANT (1)...(17): Xaa = Any Amino Acid
CCEYXXCCNPXACTGCY

SEQ ID NO: 972 - protein, 18 aa, Artificial Sequence
  Synthetically generated peptide
  VARIANT (1)...(18): Xaa = Any Amino Acid
CCEYXXCCNPXXACTGCY

SEQ ID NO: 973 - protein, 18 aa, Artificial Sequence
  Synthetically generated peptide
  VARIANT (1)...(18): Xaa = Any Amino Acid
CCEYXXCCNPXAXCTGCY

SEQ ID NO: 974 - protein, 18 aa, Artificial Sequence
  Synthetically generated peptide
  VARIANT (1)...(18): Xaa = Any Amino Acid
CCEYXXCCNPXACXTGCY

SEQ ID NO: 975 - protein, 18 aa, Artificial Sequence
  Synthetically generated peptide
  VARIANT (1)...(18): Xaa = Any Amino Acid
CCEYXXCCNPXACTXGCY

SEQ ID NO: 976 - protein, 18 aa, Artificial Sequence
  Synthetically generated peptide
  VARIANT (1)...(18): Xaa = Any Amino Acid
CCEYXXCCNPXACTGXCY

SEQ ID NO: 977 - protein, 18 aa, Artificial Sequence
  Synthetically generated peptide
  VARIANT (1)...(18): Xaa = Any Amino Acid
CCEYXXCCNPXACTGCXY

SEQ ID NO: 978 - protein, 17 aa, Artificial Sequence
  Synthetically generated peptide
  VARIANT (1)...(17): Xaa = Any Amino Acid
CCEYXXCCNPAXCTGCY

SEQ ID NO: 979 - protein, 18 aa, Artificial Sequence
  Synthetically generated peptide
  VARIANT (1)...(18): Xaa = Any Amino Acid
CCEYXXCCNPAXXCTGCY

SEQ ID NO: 980 - protein, 18 aa, Artificial Sequence
  Synthetically generated peptide
  VARIANT (1)...(18): Xaa = Any Amino Acid
CCEYXXCCNPAXCXTGCY

SEQ ID NO: 981 - protein, 18 aa, Artificial Sequence
  Synthetically generated peptide
  VARIANT (1)...(18): Xaa = Any Amino Acid
CCEYXXCCNPAXCTXGCY

SEQ ID NO: 982 - protein, 18 aa, Artificial Sequence
  Synthetically generated peptide
  VARIANT (1)...(18): Xaa = Any Amino Acid
CCEYXXCCNPAXCTGXCY

SEQ ID NO: 983 - protein, 18 aa, Artificial Sequence
  Synthetically generated peptide
  VARIANT (1)...(18): Xaa = Any Amino Acid
CCEYXXCCNPAXCTGCXY

SEQ ID NO: 984 - protein, 17 aa, Artificial Sequence
  Synthetically generated peptide
  VARIANT (1)...(17): Xaa = Any Amino Acid
CCEYXXCCNPACXTGCY

SEQ ID NO: 985 - protein, 18 aa, Artificial Sequence
  Synthetically generated peptide
  VARIANT (1)...(18): Xaa = Any Amino Acid
CCEYXXCCNPACXXTGCY

SEQ ID NO: 986 - protein, 18 aa, Artificial Sequence
  Synthetically generated peptide
  VARIANT (1)...(18): Xaa = Any Amino Acid
CCEYXXCCNPACXTXGCY

SEQ ID NO: 987 - protein, 18 aa, Artificial Sequence
  Synthetically generated peptide
  VARIANT (1)...(18): Xaa = Any Amino Acid
CCEYXXCCNPACXTGXCY

SEQ ID NO: 988 - protein, 18 aa, Artificial Sequence
  Synthetically generated peptide
  VARIANT (1)...(18): Xaa = Any Amino Acid
CCEYXXCCNPACXTGCXY

SEQ ID NO: 989 - protein, 17 aa, Artificial Sequence
  Synthetically generated peptide
  VARIANT (1)...(17): Xaa = Any Amino Acid
CCEYXXCCNPACTXGCY

SEQ ID NO: 990 - protein, 18 aa, Artificial Sequence
  Synthetically generated peptide
  VARIANT (1)...(18): Xaa = Any Amino Acid
CCEYXXCCNPACTXXGCY

SEQ ID NO: 991 - protein, 18 aa, Artificial Sequence
  Synthetically generated peptide
  VARIANT (1)...(18): Xaa = Any Amino Acid
CCEYXXCCNPACTXGXCY

SEQ ID NO: 992 - protein, 18 aa, Artificial Sequence
  Synthetically generated peptide
  VARIANT (1)...(18): Xaa = Any Amino Acid
CCEYXXCCNPACTXGCXY

SEQ ID NO: 993 - protein, 17 aa, Artificial Sequence
  Synthetically generated peptide
  VARIANT (1)...(17): Xaa = Any Amino Acid
CCEYXXCCNPACTGXCY

SEQ ID NO: 994 - protein, 18 aa, Artificial Sequence
  Synthetically generated peptide
  VARIANT (1)...(18): Xaa = Any Amino Acid
CCEYXXCCNPACTGXXCY

SEQ ID NO: 995 - protein, 18 aa, Artificial Sequence
  Synthetically generated peptide
  VARIANT (1)...(18): Xaa = Any Amino Acid
CCEYXXCCNPACTGXCXY

SEQ ID NO: 996 - protein, 17 aa, Artificial Sequence
  Synthetically generated peptide
  VARIANT (1)...(17): Xaa = Any Amino Acid
CCEYXXCCNPACTGCXY

SEQ ID NO: 997 - protein, 18 aa, Artificial Sequence
  Synthetically generated peptide
  VARIANT (1)...(18): Xaa = Any Amino Acid
CCEYXXCCNPACTGCXXY

SEQ ID NO: 998 - protein, 16 aa, Artificial Sequence
  Synthetically generated peptide
  VARIANT (1)...(16): Xaa = Any Amino Acid
  VARIANT (1)...(16): Xaa = Any Amino Acid
CCEYXCCXNPACTGCY

SEQ ID NO: 999 - protein, 17 aa, Artificial Sequence
  Synthetically generated peptide
  VARIANT (1)...(17): Xaa = Any Amino Acid
CCEYXCCXXNPACTGCY

SEQ ID NO: 1000 - protein, 18 aa, Artificial Sequence
  Synthetically generated peptide
  VARIANT (1)...(18): Xaa = Any Amino Acid
CCEYXCCXXXNPACTGCY

SEQ ID NO: 1001 - protein, 18 aa, Artificial Sequence
  Synthetically generated peptide
  VARIANT (1)...(18): Xaa = Any Amino Acid
CCEYXCCXXNXPACTGCY

SEQ ID NO: 1002 - protein, 18 aa, Artificial Sequence
  Synthetically generated peptide
  VARIANT (1)...(18): Xaa = Any Amino Acid
CCEYXCCXXNPXACTGCY

SEQ ID NO: 1003 - protein, 18 aa, Artificial Sequence
  Synthetically generated peptide
  VARIANT (1)...(18): Xaa = Any Amino Acid
CCEYXCCXXNPAXCTGCY

SEQ ID NO: 1004 - protein, 18 aa, Artificial Sequence
  Synthetically generated peptide
  VARIANT (1)...(18): Xaa = Any Amino Acid
CCEYXCCXXNPACXTGCY

SEQ ID NO: 1005 - protein, 18 aa, Artificial Sequence
  Synthetically generated peptide
  VARIANT (1)...(18): Xaa = Any Amino Acid
CCEYXCCXXNPACTXGCY

SEQ ID NO: 1006 - protein, 18 aa, Artificial Sequence
  Synthetically generated peptide
  VARIANT (1)...(18): Xaa = Any Amino Acid
CCEYXCCXXNPACTGXCY

SEQ ID NO: 1007 - protein, 18 aa, Artificial Sequence
  Synthetically generated peptide
  VARIANT (1)...(18): Xaa = Any Amino Acid
CCEYXCCXXNPACTGCXY

SEQ ID NO: 1008 - protein, 17 aa, Artificial Sequence
  Synthetically generated peptide
  VARIANT (1)...(17): Xaa = Any Amino Acid
CCEYXCCXNXPACTGCY

SEQ ID NO: 1009 - protein, 18 aa, Artificial Sequence
  Synthetically generated peptide
  VARIANT (1)...(18): Xaa = Any Amino Acid
CCEYXCCXNXXPACTGCY

SEQ ID NO: 1010 - protein, 18 aa, Artificial Sequence
  Synthetically generated peptide
  VARIANT (1)...(18): Xaa = Any Amino Acid
CCEYXCCXNXPXACTGCY

SEQ ID NO: 1011 - protein, 18 aa, Artificial Sequence
  Synthetically generated peptide
  VARIANT (1)...(18): Xaa = Any Amino Acid
CCEYXCCXNXPAXCTGCY

SEQ ID NO: 1012 - protein, 18 aa, Artificial Sequence
  Synthetically generated peptide
  VARIANT (1)...(18): Xaa = Any Amino Acid
CCEYXCCXNXPACXTGCY

SEQ ID NO: 1013 - protein, 18 aa, Artificial Sequence
  Synthetically generated peptide
  VARIANT (1)...(18): Xaa = Any Amino Acid
CCEYXCCXNXPACTXGCY

SEQ ID NO: 1014 - protein, 18 aa, Artificial Sequence
  Synthetically generated peptide
  VARIANT (1)...(18): Xaa = Any Amino Acid
CCEYXCCXNXPACTGXCY

SEQ ID NO: 1015 - protein, 18 aa, Artificial Sequence
  Synthetically generated peptide
  VARIANT (1)...(18): Xaa = Any Amino Acid
CCEYXCCXNXPACTGCXY

SEQ ID NO: 1016 - protein, 17 aa, Artificial Sequence
  Synthetically generated peptide
  VARIANT (1)...(17): Xaa = Any Amino Acid
CCEYXCCXNPXACTGCY

SEQ ID NO: 1017 - protein, 18 aa, Artificial Sequence
  Synthetically generated peptide
  VARIANT (1)...(18): Xaa = Any Amino Acid
CCEYXCCXNPXXACTGCY

SEQ ID NO: 1018 - protein, 18 aa, Artificial Sequence
  Synthetically generated peptide
  VARIANT (1)...(18): Xaa = Any Amino Acid
CCEYXCCXNPXAXCTGCY

SEQ ID NO: 1019 - protein, 18 aa, Artificial Sequence
  Synthetically generated peptide
  VARIANT (1)...(18): Xaa = Any Amino Acid
CCEYXCCXNPXACXTGCY

SEQ ID NO: 1020 - protein, 18 aa, Artificial Sequence
  Synthetically generated peptide
  VARIANT (1)...(18): Xaa = Any Amino Acid
CCEYXCCXNPXACTXGCY

SEQ ID NO: 1021 - protein, 18 aa, Artificial Sequence
  Synthetically generated peptide
  VARIANT (1)...(18): Xaa = Any Amino Acid
CCEYXCCXNPXACTGXCY

SEQ ID NO: 1022 - protein, 18 aa, Artificial Sequence
  Synthetically generated peptide
  VARIANT (1)...(18): Xaa = Any Amino Acid
CCEYXCCXNPXACTGCXY

SEQ ID NO: 1023 - protein, 17 aa, Artificial Sequence
  Synthetically generated peptide
  VARIANT (1)...(17): Xaa = Any Amino Acid
CCEYXCCXNPAXCTGCY

SEQ ID NO: 1024 - protein, 18 aa, Artificial Sequence
  Synthetically generated peptide
  VARIANT (1)...(18): Xaa = Any Amino Acid
CCEYXCCXNPAXXCTGCY

SEQ ID NO: 1025 - protein, 18 aa, Artificial Sequence
  Synthetically generated peptide
  VARIANT (1)...(18): Xaa = Any Amino Acid
CCEYXCCXNPAXCXTGCY

SEQ ID NO: 1026 - protein, 18 aa, Artificial Sequence
  Synthetically generated peptide
  VARIANT (1)...(18): Xaa = Any Amino Acid
CCEYXCCXNPAXCTXGCY

SEQ ID NO: 1027 - protein, 18 aa, Artificial Sequence
  Synthetically generated peptide
  VARIANT (1)...(18): Xaa = Any Amino Acid
CCEYXCCXNPAXCTGXCY

SEQ ID NO: 1028 - protein, 18 aa, Artificial Sequence
  Synthetically generated peptide
  VARIANT (1)...(18): Xaa = Any Amino Acid
CCEYXCCXNPAXCTGCXY

SEQ ID NO: 1029 - protein, 17 aa, Artificial Sequence
  Synthetically generated peptide
  VARIANT (1)...(17): Xaa = Any Amino Acid
CCEYXCCXNPACXTGCY

SEQ ID NO: 1030 - protein, 18 aa, Artificial Sequence
  Synthetically generated peptide
  VARIANT (1)...(18): Xaa = Any Amino Acid
CCEYXCCXNPACXXTGCY

SEQ ID NO: 1031 - protein, 18 aa, Artificial Sequence
  Synthetically generated peptide
  VARIANT (1)...(18): Xaa = Any Amino Acid
CCEYXCCXNPACXTXGCY

SEQ ID NO: 1032 - protein, 18 aa, Artificial Sequence
  Synthetically generated peptide
  VARIANT (1)...(18): Xaa = Any Amino Acid
CCEYXCCXNPACXTGXCY

SEQ ID NO: 1033 - protein, 18 aa, Artificial Sequence
  Synthetically generated peptide
  VARIANT (1)...(18): Xaa = Any Amino Acid
CCEYXCCXNPACXTGCXY

SEQ ID NO: 1034 - protein, 17 aa, Artificial Sequence
  Synthetically generated peptide
  VARIANT (1)...(17): Xaa = Any Amino Acid
CCEYXCCXNPACTXGCY

SEQ ID NO: 1035 - protein, 18 aa, Artificial Sequence
  Synthetically generated peptide
  VARIANT (1)...(18): Xaa = Any Amino Acid
CCEYXCCXNPACTXXGCY

SEQ ID NO: 1036 - protein, 18 aa, Artificial Sequence
  Synthetically generated peptide
  VARIANT (1)...(18): Xaa = Any Amino Acid
CCEYXCCXNPACTXGXCY

SEQ ID NO: 1037 - protein, 18 aa, Artificial Sequence
  Synthetically generated peptide
  VARIANT (1)...(18): Xaa = Any Amino Acid
CCEYXCCXNPACTXGCXY

SEQ ID NO: 1038 - protein, 17 aa, Artificial Sequence
  Synthetically generated peptide
  VARIANT (1)...(17): Xaa = Any Amino Acid
CCEYXCCXNPACTGXCY

SEQ ID NO: 1039 - protein, 18 aa, Artificial Sequence
  Synthetically generated peptide
  VARIANT (1)...(18): Xaa = Any Amino Acid
CCEYXCCXNPACTGXXCY

SEQ ID NO: 1040 - protein, 18 aa, Artificial Sequence
  Synthetically generated peptide
  VARIANT (1)...(18): Xaa = Any Amino Acid
CCEYXCCXNPACTGXCXY

SEQ ID NO: 1041 - protein, 17 aa, Artificial Sequence
  Synthetically generated peptide
  VARIANT (1)...(17): Xaa = Any Amino Acid
CCEYXCCXNPACTGCXY

SEQ ID NO: 1042 - protein, 18 aa, Artificial Sequence
  Synthetically generated peptide
  VARIANT (1)...(18): Xaa = Any Amino Acid
CCEYXCCXNPACTGCXXY

SEQ ID NO: 1043 - protein, 16 aa, Artificial Sequence
  Synthetically generated peptide
  VARIANT (1)...(16): Xaa = Any Amino Acid
  VARIANT (1)...(16): Xaa = Any Amino Acid
CCEYXCCNXPACTGCY

SEQ ID NO: 1044 - protein, 17 aa, Artificial Sequence
  Synthetically generated peptide
  VARIANT (1)...(17): Xaa = Any Amino Acid
CCEYXCCNXXPACTGCY

SEQ ID NO: 1045 - protein, 18 aa, Artificial Sequence
  Synthetically generated peptide
  VARIANT (1)...(18): Xaa = Any Amino Acid
CCEYXCCNXXXPACTGCY

SEQ ID NO: 1046 - protein, 18 aa, Artificial Sequence
  Synthetically generated peptide
  VARIANT (1)...(18): Xaa = Any Amino Acid
CCEYXCCNXXPXACTGCY

SEQ ID NO: 1047 - protein, 18 aa, Artificial Sequence
  Synthetically generated peptide
  VARIANT (1)...(18): Xaa = Any Amino Acid
CCEYXCCNXXPAXCTGCY

SEQ ID NO: 1048 - protein, 18 aa, Artificial Sequence
  Synthetically generated peptide
  VARIANT (1)...(18): Xaa = Any Amino Acid
CCEYXCCNXXPACXTGCY

SEQ ID NO: 1049 - protein, 18 aa, Artificial Sequence
  Synthetically generated peptide
  VARIANT (1)...(18): Xaa = Any Amino Acid
CCEYXCCNXXPACTXGCY

SEQ ID NO: 1050 - protein, 18 aa, Artificial Sequence
  Synthetically generated peptide
  VARIANT (1)...(18): Xaa = Any Amino Acid
CCEYXCCNXXPACTGXCY

SEQ ID NO: 1051 - protein, 18 aa, Artificial Sequence
  Synthetically generated peptide
  VARIANT (1)...(18): Xaa = Any Amino Acid
CCEYXCCNXXPACTGCXY

SEQ ID NO: 1052 - protein, 17 aa, Artificial Sequence
  Synthetically generated peptide
  VARIANT (1)...(17): Xaa = Any Amino Acid
CCEYXCCNXPXACTGCY

SEQ ID NO: 1053 - protein, 18 aa, Artificial Sequence
  Synthetically generated peptide
  VARIANT (1)...(18): Xaa = Any Amino Acid
CCEYXCCNXPXXACTGCY

SEQ ID NO: 1054 - protein, 18 aa, Artificial Sequence
  Synthetically generated peptide
  VARIANT (1)...(18): Xaa = Any Amino Acid
CCEYXCCNXPXAXCTGCY

SEQ ID NO: 1055 - protein, 18 aa, Artificial Sequence
  Synthetically generated peptide
  VARIANT (1)...(18): Xaa = Any Amino Acid
CCEYXCCNXPXACXTGCY

SEQ ID NO: 1056 - protein, 18 aa, Artificial Sequence
  Synthetically generated peptide
  VARIANT (1)...(18): Xaa = Any Amino Acid
CCEYXCCNXPXACTXGCY

SEQ ID NO: 1057 - protein, 18 aa, Artificial Sequence
  Synthetically generated peptide
  VARIANT (1)...(18): Xaa = Any Amino Acid
CCEYXCCNXPXACTGXCY

SEQ ID NO: 1058 - protein, 18 aa, Artificial Sequence
  Synthetically generated peptide
  VARIANT (1)...(18): Xaa = Any Amino Acid
CCEYXCCNXPXACTGCXY

SEQ ID NO: 1059 - protein, 17 aa, Artificial Sequence
  Synthetically generated peptide
  VARIANT (1)...(17): Xaa = Any Amino Acid
CCEYXCCNXPAXCTGCY

SEQ ID NO: 1060 - protein, 18 aa, Artificial Sequence
  Synthetically generated peptide
  VARIANT (1)...(18): Xaa = Any Amino Acid
CCEYXCCNXPAXXCTGCY

SEQ ID NO: 1061 - protein, 18 aa, Artificial Sequence
  Synthetically generated peptide
  VARIANT (1)...(18): Xaa = Any Amino Acid
CCEYXCCNXPAXCXTGCY

SEQ ID NO: 1062 - protein, 18 aa, Artificial Sequence
  Synthetically generated peptide
  VARIANT (1)...(18): Xaa = Any Amino Acid
CCEYXCCNXPAXCTXGCY

SEQ ID NO: 1063 - protein, 18 aa, Artificial Sequence
  Synthetically generated peptide
  VARIANT (1)...(18): Xaa = Any Amino Acid
CCEYXCCNXPAXCTGXCY

SEQ ID NO: 1064 - protein, 18 aa, Artificial Sequence
  Synthetically generated peptide
  VARIANT (1)...(18): Xaa = Any Amino Acid
CCEYXCCNXPAXCTGCXY

SEQ ID NO: 1065 - protein, 17 aa, Artificial Sequence
  Synthetically generated peptide
  VARIANT (1)...(17): Xaa = Any Amino Acid
CCEYXCCNXPACXTGCY

SEQ ID NO: 1066 - protein, 18 aa, Artificial Sequence
  Synthetically generated peptide
  VARIANT (1)...(18): Xaa = Any Amino Acid
CCEYXCCNXPACXXTGCY

SEQ ID NO: 1067 - protein, 18 aa, Artificial Sequence
  Synthetically generated peptide
  VARIANT (1)...(18): Xaa = Any Amino Acid
CCEYXCCNXPACXTXGCY

SEQ ID NO: 1068 - protein, 18 aa, Artificial Sequence
  Synthetically generated peptide
  VARIANT (1)...(18): Xaa = Any Amino Acid
CCEYXCCNXPACXTGXCY

SEQ ID NO: 1069 - protein, 18 aa, Artificial Sequence
  Synthetically generated peptide
  VARIANT (1)...(18): Xaa = Any Amino Acid
CCEYXCCNXPACXTGCXY

SEQ ID NO: 1070 - protein, 17 aa, Artificial Sequence
  Synthetically generated peptide
  VARIANT (1)...(17): Xaa = Any Amino Acid
CCEYXCCNXPACTXGCY

SEQ ID NO: 1071 - protein, 18 aa, Artificial Sequence
  Synthetically generated peptide
  VARIANT (1)...(18): Xaa = Any Amino Acid
CCEYXCCNXPACTXXGCY

SEQ ID NO: 1072 - protein, 18 aa, Artificial Sequence
  Synthetically generated peptide
  VARIANT (1)...(18): Xaa = Any Amino Acid
CCEYXCCNXPACTXGXCY

SEQ ID NO: 1073 - protein, 18 aa, Artificial Sequence
  Synthetically generated peptide
  VARIANT (1)...(18): Xaa = Any Amino Acid
CCEYXCCNXPACTXGCXY

SEQ ID NO: 1074 - protein, 17 aa, Artificial Sequence
  Synthetically generated peptide
  VARIANT (1)...(17): Xaa = Any Amino Acid
CCEYXCCNXPACTGXCY

SEQ ID NO: 1075 - protein, 18 aa, Artificial Sequence
  Synthetically generated peptide
  VARIANT (1)...(18): Xaa = Any Amino Acid
CCEYXCCNXPACTGXXCY

SEQ ID NO: 1076 - protein, 18 aa, Artificial Sequence
  Synthetically generated peptide
  VARIANT (1)...(18): Xaa = Any Amino Acid
CCEYXCCNXPACTGXCXY

SEQ ID NO: 1077 - protein, 17 aa, Artificial Sequence
  Synthetically generated peptide
  VARIANT (1)...(17): Xaa = Any Amino Acid
CCEYXCCNXPACTGCXY

SEQ ID NO: 1078 - protein, 18 aa, Artificial Sequence
  Synthetically generated peptide
  VARIANT (1)...(18): Xaa = Any Amino Acid
CCEYXCCNXPACTGCXXY

SEQ ID NO: 1079 - protein, 16 aa, Artificial Sequence
  Synthetically generated peptide
  VARIANT (1)...(16): Xaa = Any Amino Acid
  VARIANT (1)...(16): Xaa = Any Amino Acid
CCEYXCCNPXACTGCY

SEQ ID NO: 1080 - protein, 17 aa, Artificial Sequence
  Synthetically generated peptide
  VARIANT (1)...(17): Xaa = Any Amino Acid
CCEYXCCNPXXACTGCY

SEQ ID NO: 1081 - protein, 18 aa, Artificial Sequence
  Synthetically generated peptide
  VARIANT (1)...(18): Xaa = Any Amino Acid
CCEYXCCNPXXXACTGCY

SEQ ID NO: 1082 - protein, 18 aa, Artificial Sequence
  Synthetically generated peptide
  VARIANT (1)...(18): Xaa = Any Amino Acid
CCEYXCCNPXXAXCTGCY

SEQ ID NO: 1083 - protein, 18 aa, Artificial Sequence
  Synthetically generated peptide
  VARIANT (1)...(18): Xaa = Any Amino Acid
CCEYXCCNPXXACXTGCY

SEQ ID NO: 1084 - protein, 18 aa, Artificial Sequence
  Synthetically generated peptide
  VARIANT (1)...(18): Xaa = Any Amino Acid
CCEYXCCNPXXACTXGCY

SEQ ID NO: 1085 - protein, 18 aa, Artificial Sequence
  Synthetically generated peptide
  VARIANT (1)...(18): Xaa = Any Amino Acid
CCEYXCCNPXXACTGXCY

SEQ ID NO: 1086 - protein, 18 aa, Artificial Sequence
  Synthetically generated peptide
  VARIANT (1)...(18): Xaa = Any Amino Acid
CCEYXCCNPXXACTGCXY

SEQ ID NO: 1087 - protein, 17 aa, Artificial Sequence
  Synthetically generated peptide
  VARIANT (1)...(17): Xaa = Any Amino Acid
CCEYXCCNPXAXCTGCY

SEQ ID NO: 1088 - protein, 18 aa, Artificial Sequence
  Synthetically generated peptide
  VARIANT (1)...(18): Xaa = Any Amino Acid
CCEYXCCNPXAXXCTGCY

SEQ ID NO: 1089 - protein, 18 aa, Artificial Sequence
  Synthetically generated peptide
  VARIANT (1)...(18): Xaa = Any Amino Acid
CCEYXCCNPXAXCXTGCY

SEQ ID NO: 1090 - protein, 18 aa, Artificial Sequence
  Synthetically generated peptide
  VARIANT (1)...(18): Xaa = Any Amino Acid
CCEYXCCNPXAXCTXGCY

SEQ ID NO: 1091 - protein, 18 aa, Artificial Sequence
  Synthetically generated peptide
  VARIANT (1)...(18): Xaa = Any Amino Acid
CCEYXCCNPXAXCTGXCY

SEQ ID NO: 1092 - protein, 17 aa, Artificial Sequence
  Synthetically generated peptide
  VARIANT (1)...(17): Xaa = Any Amino Acid
CCEYXCCNPXACXTGCY

SEQ ID NO: 1093 - protein, 18 aa, Artificial Sequence
  Synthetically generated peptide
  VARIANT (1)...(18): Xaa = Any Amino Acid
CCEYXCCNPXACXXTGCY

SEQ ID NO: 1094 - protein, 18 aa, Artificial Sequence
  Synthetically generated peptide
  VARIANT (1)...(18): Xaa = Any Amino Acid
CCEYXCCNPXACXTXGCY

SEQ ID NO: 1095 - protein, 18 aa, Artificial Sequence
  Synthetically generated peptide
  VARIANT (1)...(18): Xaa = Any Amino Acid
CCEYXCCNPXACXTGXCY

SEQ ID NO: 1096 - protein, 18 aa, Artificial Sequence
  Synthetically generated peptide
  VARIANT (1)...(18): Xaa = Any Amino Acid
CCEYXCCNPXACXTGCXY

SEQ ID NO: 1097 - protein, 17 aa, Artificial Sequence
  Synthetically generated peptide
  VARIANT (1)...(17): Xaa = Any Amino Acid
CCEYXCCNPXACTXGCY

SEQ ID NO: 1098 - protein, 18 aa, Artificial Sequence
  Synthetically generated peptide
  VARIANT (1)...(18): Xaa = Any Amino Acid
CCEYXCCNPXACTXXGCY

SEQ ID NO: 1099 - protein, 18 aa, Artificial Sequence
  Synthetically generated peptide
  VARIANT (1)...(18): Xaa = Any Amino Acid
CCEYXCCNPXACTXGXCY

SEQ ID NO: 1100 - protein, 18 aa, Artificial Sequence
  Synthetically generated peptide
  VARIANT (1)...(18): Xaa = Any Amino Acid
CCEYXCCNPXACTXGCXY

SEQ ID NO: 1101 - protein, 17 aa, Artificial Sequence
  Synthetically generated peptide
  VARIANT (1)...(17): Xaa = Any Amino Acid
CCEYXCCNPXACTGXCY

SEQ ID NO: 1102 - protein, 18 aa, Artificial Sequence
  Synthetically generated peptide
  VARIANT (1)...(18): Xaa = Any Amino Acid
CCEYXCCNPXACTGXXCY

SEQ ID NO: 1103 - protein, 18 aa, Artificial Sequence
  Synthetically generated peptide
  VARIANT (1)...(18): Xaa = Any Amino Acid
CCEYXCCNPXACTGXCXY

SEQ ID NO: 1104 - protein, 17 aa, Artificial Sequence
  Synthetically generated peptide
  VARIANT (1)...(17): Xaa = Any Amino Acid
CCEYXCCNPXACTGCXY

SEQ ID NO: 1105 - protein, 18 aa, Artificial Sequence
  Synthetically generated peptide
  VARIANT (1)...(18): Xaa = Any Amino Acid
CCEYXCCNPXACTGCXXY

SEQ ID NO: 1106 - protein, 16 aa, Artificial Sequence
  Synthetically generated peptide
  VARIANT (1)...(16): Xaa = Any Amino Acid
  VARIANT (1)...(16): Xaa = Any Amino Acid
CCEYXCCNPAXCTGCY

SEQ ID NO: 1107 - protein, 17 aa, Artificial Sequence
  Synthetically generated peptide
  VARIANT (1)...(17): Xaa = Any Amino Acid
CCEYXCCNPAXXCTGCY

SEQ ID NO: 1108 - protein, 18 aa, Artificial Sequence
  Synthetically generated peptide
  VARIANT (1)...(18): Xaa = Any Amino Acid
CCEYXCCNPAXXXCTGCY

SEQ ID NO: 1109 - protein, 18 aa, Artificial Sequence
  Synthetically generated peptide
  VARIANT (1)...(18): Xaa = Any Amino Acid
CCEYXCCNPAXXCXTGCY

SEQ ID NO: 1110 - protein, 18 aa, Artificial Sequence
  Synthetically generated peptide
  VARIANT (1)...(18): Xaa = Any Amino Acid
CCEYXCCNPAXXCTXGCY

SEQ ID NO: 1111 - protein, 18 aa, Artificial Sequence
  Synthetically generated peptide
  VARIANT (1)...(18): Xaa = Any Amino Acid
CCEYXCCNPAXXCTGXCY

SEQ ID NO: 1112 - protein, 18 aa, Artificial Sequence
  Synthetically generated peptide
  VARIANT (1)...(18): Xaa = Any Amino Acid
CCEYXCCNPAXXCTGCXY

SEQ ID NO: 1113 - protein, 17 aa, Artificial Sequence
  Synthetically generated peptide
  VARIANT (1)...(17): Xaa = Any Amino Acid
CCEYXCCNPAXCXTGCY

SEQ ID NO: 1114 - protein, 18 aa, Artificial Sequence
  Synthetically generated peptide
  VARIANT (1)...(18): Xaa = Any Amino Acid
CCEYXCCNPAXCXXTGCY

SEQ ID NO: 1115 - protein, 18 aa, Artificial Sequence
  Synthetically generated peptide
  VARIANT (1)...(18): Xaa = Any Amino Acid
CCEYXCCNPAXCXTXGCY

SEQ ID NO: 1116 - protein, 18 aa, Artificial Sequence
  Synthetically generated peptide
  VARIANT (1)...(18): Xaa = Any Amino Acid
CCEYXCCNPAXCXTGXCY

SEQ ID NO: 1117 - protein, 18 aa, Artificial Sequence
  Synthetically generated peptide
  VARIANT (1)...(18): Xaa = Any Amino Acid
CCEYXCCNPAXCXTGCXY

SEQ ID NO: 1118 - protein, 17 aa, Artificial Sequence
  Synthetically generated peptide
  VARIANT (1)...(17): Xaa = Any Amino Acid
CCEYXCCNPAXCTXGCY

SEQ ID NO: 1119 - protein, 18 aa, Artificial Sequence
  Synthetically generated peptide
  VARIANT (1)...(18): Xaa = Any Amino Acid
CCEYXCCNPAXCTXXGCY

SEQ ID NO: 1120 - protein, 18 aa, Artificial Sequence
  Synthetically generated peptide
  VARIANT (1)...(18): Xaa = Any Amino Acid
CCEYXCCNPAXCTXGXCY

SEQ ID NO: 1121 - protein, 18 aa, Artificial Sequence
  Synthetically generated peptide
  VARIANT (1)...(18): Xaa = Any Amino Acid
CCEYXCCNPAXCTXGCXY

SEQ ID NO: 1122 - protein, 17 aa, Artificial Sequence
  Synthetically generated peptide
  VARIANT (1)...(17): Xaa = Any Amino Acid
CCEYXCCNPAXCTGXCY

SEQ ID NO: 1123 - protein, 18 aa, Artificial Sequence
  Synthetically generated peptide
  VARIANT (1)...(18): Xaa = Any Amino Acid
CCEYXCCNPAXCTGXXCY

SEQ ID NO: 1124 - protein, 18 aa, Artificial Sequence
  Synthetically generated peptide
  VARIANT (1)...(18): Xaa = Any Amino Acid
CCEYXCCNPAXCTGXCXY

SEQ ID NO: 1125 - protein, 17 aa, Artificial Sequence
  Synthetically generated peptide
  VARIANT (1)...(17): Xaa = Any Amino Acid
CCEYXCCNPAXCTGCXY

SEQ ID NO: 1126 - protein, 18 aa, Artificial Sequence
  Synthetically generated peptide
  VARIANT (1)...(18): Xaa = Any Amino Acid
CCEYXCCNPAXCTGCXXY

SEQ ID NO: 1127 - protein, 16 aa, Artificial Sequence
  Synthetically generated peptide
  VARIANT (1)...(16): Xaa = Any Amino Acid
  VARIANT (1)...(16): Xaa = Any Amino Acid
CCEYXCCNPACXTGCY

SEQ ID NO: 1128 - protein, 17 aa, Artificial Sequence
  Synthetically generated peptide
  VARIANT (1)...(17): Xaa = Any Amino Acid
CCEYXCCNPACXXTGCY

SEQ ID NO: 1129 - protein, 18 aa, Artificial Sequence
  Synthetically generated peptide
  VARIANT (1)...(18): Xaa = Any Amino Acid
CCEYXCCNPACXXXTGCY

SEQ ID NO: 1130 - protein, 18 aa, Artificial Sequence
  Synthetically generated peptide
  VARIANT (1)...(18): Xaa = Any Amino Acid
CCEYXCCNPACXXTXGCY

SEQ ID NO: 1131 - protein, 18 aa, Artificial Sequence
  Synthetically generated peptide
  VARIANT (1)...(18): Xaa = Any Amino Acid
CCEYXCCNPACXXTGXCY

SEQ ID NO: 1132 - protein, 18 aa, Artificial Sequence
  Synthetically generated peptide
  VARIANT (1)...(18): Xaa = Any Amino Acid
CCEYXCCNPACXXTGCXY

SEQ ID NO: 1133 - protein, 17 aa, Artificial Sequence
  Synthetically generated peptide
  VARIANT (1)...(17): Xaa = Any Amino Acid
CCEYXCCNPACXTXGCY

SEQ ID NO: 1134 - protein, 18 aa, Artificial Sequence
  Synthetically generated peptide
  VARIANT (1)...(18): Xaa = Any Amino Acid
CCEYXCCNPACXTXXGCY

SEQ ID NO: 1135 - protein, 18 aa, Artificial Sequence
  Synthetically generated peptide
  VARIANT (1)...(18): Xaa = Any Amino Acid
CCEYXCCNPACXTXGXCY

SEQ ID NO: 1136 - protein, 18 aa, Artificial Sequence
  Synthetically generated peptide
  VARIANT (1)...(18): Xaa = Any Amino Acid
CCEYXCCNPACXTXGCXY

SEQ ID NO: 1137 - protein, 17 aa, Artificial Sequence
  Synthetically generated peptide
  VARIANT (1)...(17): Xaa = Any Amino Acid
CCEYXCCNPACXTGXCY

SEQ ID NO: 1138 - protein, 18 aa, Artificial Sequence
  Synthetically generated peptide
  VARIANT (1)...(18): Xaa = Any Amino Acid
CCEYXCCNPACXTGXXCY

SEQ ID NO: 1139 - protein, 18 aa, Artificial Sequence
  Synthetically generated peptide
  VARIANT (1)...(18): Xaa = Any Amino Acid
CCEYXCCNPACXTGXCXY

SEQ ID NO: 1140 - protein, 17 aa, Artificial Sequence
  Synthetically generated peptide
  VARIANT (1)...(17): Xaa = Any Amino Acid
CCEYXCCNPACXTGCXY

SEQ ID NO: 1141 - protein, 18 aa, Artificial Sequence
  Synthetically generated peptide
  VARIANT (1)...(18): Xaa = Any Amino Acid
CCEYXCCNPACXTGCXXY

SEQ ID NO: 1142 - protein, 16 aa, Artificial Sequence
  Synthetically generated peptide
  VARIANT (1)...(16): Xaa = Any Amino Acid
  VARIANT (1)...(16): Xaa = Any Amino Acid
CCEYXCCNPACTXGCY

SEQ ID NO: 1143 - protein, 17 aa, Artificial Sequence
  Synthetically generated peptide
  VARIANT (1)...(17): Xaa = Any Amino Acid
CCEYXCCNPACTXXGCY

SEQ ID NO: 1144 - protein, 18 aa, Artificial Sequence
  Synthetically generated peptide
  VARIANT (1)...(18): Xaa = Any Amino Acid
CCEYXCCNPACTXXXGCY

SEQ ID NO: 1145 - protein, 18 aa, Artificial Sequence
  Synthetically generated peptide
  VARIANT (1)...(18): Xaa = Any Amino Acid
CCEYXCCNPACTXXGXCY

SEQ ID NO: 1146 - protein, 18 aa, Artificial Sequence
  Synthetically generated peptide
  VARIANT (1)...(18): Xaa = Any Amino Acid
CCEYXCCNPACTXXGCXY

SEQ ID NO: 1147 - protein, 17 aa, Artificial Sequence
  Synthetically generated peptide
  VARIANT (1)...(17): Xaa = Any Amino Acid
CCEYXCCNPACTXGXCY

SEQ ID NO: 1148 - protein, 18 aa, Artificial Sequence
  Synthetically generated peptide
  VARIANT (1)...(18): Xaa = Any Amino Acid
CCEYXCCNPACTXGXXCY

SEQ ID NO: 1149 - protein, 18 aa, Artificial Sequence
  Synthetically generated peptide
  VARIANT (1)...(18): Xaa = Any Amino Acid
CCEYXCCNPACTXGXCXY

SEQ ID NO: 1150 - protein, 17 aa, Artificial Sequence
  Synthetically generated peptide
  VARIANT (1)...(17): Xaa = Any Amino Acid
CCEYXCCNPACTXGCXY

SEQ ID NO: 1151 - protein, 18 aa, Artificial Sequence
  Synthetically generated peptide
  VARIANT (1)...(18): Xaa = Any Amino Acid
CCEYXCCNPACTXGCXXY

SEQ ID NO: 1152 - protein, 16 aa, Artificial Sequence
  Synthetically generated peptide
  VARIANT (1)...(16): Xaa = Any Amino Acid
  VARIANT (1)...(16): Xaa = Any Amino Acid
CCEYXCCNPACTGXCY

SEQ ID NO: 1153 - protein, 17 aa, Artificial Sequence
  Synthetically generated peptide
  VARIANT (1)...(17): Xaa = Any Amino Acid
CCEYXCCNPACTGXXCY

SEQ ID NO: 1154 - protein, 18 aa, Artificial Sequence
  Synthetically generated peptide
  VARIANT (1)...(18): Xaa = Any Amino Acid
CCEYXCCNPACTGXXXCY

SEQ ID NO: 1155 - protein, 18 aa, Artificial Sequence
  Synthetically generated peptide
  VARIANT (1)...(18): Xaa = Any Amino Acid
CCEYXCCNPACTGXXCXY

SEQ ID NO: 1156 - protein, 17 aa, Artificial Sequence
  Synthetically generated peptide
  VARIANT (1)...(17): Xaa = Any Amino Acid
CCEYXCCNPACTGXCXY

SEQ ID NO: 1157 - protein, 18 aa, Artificial Sequence
  Synthetically generated peptide
  VARIANT (1)...(18): Xaa = Any Amino Acid
CCEYXCCNPACTGXCXXY

SEQ ID NO: 1158 - protein, 16 aa, Artificial Sequence
  Synthetically generated peptide
  VARIANT (1)...(16): Xaa = Any Amino Acid
  VARIANT (1)...(16): Xaa = Any Amino Acid
CCEYXCCNPACTGCXY

SEQ ID NO: 1159 - protein, 17 aa, Artificial Sequence
  Synthetically generated peptide
  VARIANT (1)...(17): Xaa = Any Amino Acid
CCEYXCCNPACTGCXXY

SEQ ID NO: 1160 - protein, 18 aa, Artificial Sequence
  Synthetically generated peptide
  VARIANT (1)...(18): Xaa = Any Amino Acid
CCEYXCCNPACTGCXXXY

SEQ ID NO: 1161 - protein, 15 aa, Artificial Sequence
  Synthetically generated peptide
  VARIANT (1)...(15): Xaa = Any Amino Acid
  VARIANT (1)...(15): Xaa = Any Amino Acid
CCEYCCXNPACTGCY

SEQ ID NO: 1162 - protein, 16 aa, Artificial Sequence
  Synthetically generated peptide
  VARIANT (1)...(16): Xaa = Any Amino Acid
  VARIANT (1)...(16): Xaa = Any Amino Acid
CCEYCCXXNPACTGCY

SEQ ID NO: 1163 - protein, 17 aa, Artificial Sequence
  Synthetically generated peptide
  VARIANT (1)...(17): Xaa = Any Amino Acid
CCEYCCXXXNPACTGCY

SEQ ID NO: 1164 - protein, 18 aa, Artificial Sequence
  Synthetically generated peptide
  VARIANT (1)...(18): Xaa = Any Amino Acid
CCEYCCXXXXNPACTGCY

SEQ ID NO: 1165 - protein, 18 aa, Artificial Sequence
  Synthetically generated peptide
  VARIANT (1)...(18): Xaa = Any Amino Acid
CCEYCCXXXNXPACTGCY

SEQ ID NO: 1166 - protein, 18 aa, Artificial Sequence
  Synthetically generated peptide
  VARIANT (1)...(18): Xaa = Any Amino Acid
CCEYCCXXXNPXACTGCY

SEQ ID NO: 1167 - protein, 18 aa, Artificial Sequence
  Synthetically generated peptide
  VARIANT (1)...(18): Xaa = Any Amino Acid
CCEYCCXXXNPAXCTGCY

SEQ ID NO: 1168 - protein, 18 aa, Artificial Sequence
  Synthetically generated peptide
  VARIANT (1)...(18): Xaa = Any Amino Acid
CCEYCCXXXNPACXTGCY

SEQ ID NO: 1169 - protein, 18 aa, Artificial Sequence
  Synthetically generated peptide
  VARIANT (1)...(18): Xaa = Any Amino Acid
CCEYCCXXXNPACTXGCY

SEQ ID NO: 1170 - protein, 18 aa, Artificial Sequence
  Synthetically generated peptide
  VARIANT (1)...(18): Xaa = Any Amino Acid
CCEYCCXXXNPACTGXCY

SEQ ID NO: 1171 - protein, 18 aa, Artificial Sequence
  Synthetically generated peptide
  VARIANT (1)...(18): Xaa = Any Amino Acid
CCEYCCXXXNPACTGCXY

SEQ ID NO: 1172 - protein, 17 aa, Artificial Sequence
  Synthetically generated peptide
  VARIANT (1)...(17): Xaa = Any Amino Acid
CCEYCCXXNXPACTGCY

SEQ ID NO: 1173 - protein, 18 aa, Artificial Sequence
  Synthetically generated peptide
  VARIANT (1)...(18): Xaa = Any Amino Acid
CCEYCCXXNXXPACTGCY

SEQ ID NO: 1174 - protein, 18 aa, Artificial Sequence
  Synthetically generated peptide
  VARIANT (1)...(18): Xaa = Any Amino Acid
CCEYCCXXNXPXACTGCY

SEQ ID NO: 1175 - protein, 18 aa, Artificial Sequence
  Synthetically generated peptide
  VARIANT (1)...(18): Xaa = Any Amino Acid
CCEYCCXXNXPAXCTGCY

SEQ ID NO: 1176 - protein, 18 aa, Artificial Sequence
  Synthetically generated peptide
  VARIANT (1)...(18): Xaa = Any Amino Acid
CCEYCCXXNXPACXTGCY

SEQ ID NO: 1177 - protein, 18 aa, Artificial Sequence
  Synthetically generated peptide
  VARIANT (1)...(18): Xaa = Any Amino Acid
CCEYCCXXNXPACTXGCY

SEQ ID NO: 1178 - protein, 18 aa, Artificial Sequence
  Synthetically generated peptide
  VARIANT (1)...(18): Xaa = Any Amino Acid
CCEYCCXXNXPACTGXCY

SEQ ID NO: 1179 - protein, 18 aa, Artificial Sequence
  Synthetically generated peptide
  VARIANT (1)...(18): Xaa = Any Amino Acid
CCEYCCXXNXPACTGCXY

SEQ ID NO: 1180 - protein, 17 aa, Artificial Sequence
  Synthetically generated peptide
  VARIANT (1)...(17): Xaa = Any Amino Acid
CCEYCCXXNPXACTGCY

SEQ ID NO: 1181 - protein, 18 aa, Artificial Sequence
  Synthetically generated peptide
  VARIANT (1)...(18): Xaa = Any Amino Acid
CCEYCCXXNPXXACTGCY

SEQ ID NO: 1182 - protein, 18 aa, Artificial Sequence
  Synthetically generated peptide
  VARIANT (1)...(18): Xaa = Any Amino Acid
CCEYCCXXNPXAXCTGCY

SEQ ID NO: 1183 - protein, 18 aa, Artificial Sequence
  Synthetically generated peptide
  VARIANT (1)...(18): Xaa = Any Amino Acid
CCEYCCXXNPXACXTGCY

SEQ ID NO: 1184 - protein, 18 aa, Artificial Sequence
  Synthetically generated peptide
  VARIANT (1)...(18): Xaa = Any Amino Acid
CCEYCCXXNPXACTXGCY

SEQ ID NO: 1185 - protein, 18 aa, Artificial Sequence
  Synthetically generated peptide
  VARIANT (1)...(18): Xaa = Any Amino Acid
CCEYCCXXNPXACTGXCY

SEQ ID NO: 1186 - protein, 18 aa, Artificial Sequence
  Synthetically generated peptide
  VARIANT (1)...(18): Xaa = Any Amino Acid
CCEYCCXXNPXACTGCXY

SEQ ID NO: 1187 - protein, 17 aa, Artificial Sequence
  Synthetically generated peptide
  VARIANT (1)...(17): Xaa = Any Amino Acid
CCEYCCXXNPAXCTGCY

SEQ ID NO: 1188 - protein, 18 aa, Artificial Sequence
  Synthetically generated peptide
  VARIANT (1)...(18): Xaa = Any Amino Acid
CCEYCCXXNPAXXCTGCY

SEQ ID NO: 1189 - protein, 18 aa, Artificial Sequence
  Synthetically generated peptide
  VARIANT (1)...(18): Xaa = Any Amino Acid
CCEYCCXXNPAXCXTGCY

SEQ ID NO: 1190 - protein, 18 aa, Artificial Sequence
  Synthetically generated peptide
  VARIANT (1)...(18): Xaa = Any Amino Acid
CCEYCCXXNPAXCTXGCY

SEQ ID NO: 1191 - protein, 18 aa, Artificial Sequence
  Synthetically generated peptide
  VARIANT (1)...(18): Xaa = Any Amino Acid
CCEYCCXXNPAXCTGXCY

SEQ ID NO: 1192 - protein, 18 aa, Artificial Sequence
  Synthetically generated peptide
  VARIANT (1)...(18): Xaa = Any Amino Acid
CCEYCCXXNPAXCTGCXY

SEQ ID NO: 1193 - protein, 17 aa, Artificial Sequence
  Synthetically generated peptide
  VARIANT (1)...(17): Xaa = Any Amino Acid
CCEYCCXXNPACXTGCY

SEQ ID NO: 1194 - protein, 18 aa, Artificial Sequence
  Synthetically generated peptide
  VARIANT (1)...(18): Xaa = Any Amino Acid
CCEYCCXXNPACXXTGCY

SEQ ID NO: 1195 - protein, 18 aa, Artificial Sequence
  Synthetically generated peptide
  VARIANT (1)...(18): Xaa = Any Amino Acid
CCEYCCXXNPACXTXGCY

SEQ ID NO: 1196 - protein, 18 aa, Artificial Sequence
  Synthetically generated peptide
  VARIANT (1)...(18): Xaa = Any Amino Acid
CCEYCCXXNPACXTGXCY

SEQ ID NO: 1197 - protein, 18 aa, Artificial Sequence
  Synthetically generated peptide
  VARIANT (1)...(18): Xaa = Any Amino Acid
CCEYCCXXNPACXTGCXY

SEQ ID NO: 1198 - protein, 17 aa, Artificial Sequence
  Synthetically generated peptide
  VARIANT (1)...(17): Xaa = Any Amino Acid
CCEYCCXXNPACTXGCY

SEQ ID NO: 1199 - protein, 18 aa, Artificial Sequence
  Synthetically generated peptide
  VARIANT (1)...(18): Xaa = Any Amino Acid
CCEYCCXXNPACTXXGCY

SEQ ID NO: 1200 - protein, 18 aa, Artificial Sequence
  Synthetically generated peptide
  VARIANT (1)...(18): Xaa = Any Amino Acid
CCEYCCXXNPACTXGXCY

SEQ ID NO: 1201 - protein, 18 aa, Artificial Sequence
  Synthetically generated peptide
  VARIANT (1)...(18): Xaa = Any Amino Acid
CCEYCCXXNPACTXGCXY

SEQ ID NO: 1202 - protein, 17 aa, Artificial Sequence
  Synthetically generated peptide
  VARIANT (1)...(17): Xaa = Any Amino Acid
CCEYCCXXNPACTGXCY

SEQ ID NO: 1203 - protein, 18 aa, Artificial Sequence
  Synthetically generated peptide
  VARIANT (1)...(18): Xaa = Any Amino Acid
CCEYCCXXNPACTGXXCY

SEQ ID NO: 1204 - protein, 18 aa, Artificial Sequence
  Synthetically generated peptide
  VARIANT (1)...(18): Xaa = Any Amino Acid
CCEYCCXXNPACTGXCXY

SEQ ID NO: 1205 - protein, 17 aa, Artificial Sequence
  Synthetically generated peptide
  VARIANT (1)...(17): Xaa = Any Amino Acid
CCEYCCXXNPACTGCXY

SEQ ID NO: 1206 - protein, 18 aa, Artificial Sequence
  Synthetically generated peptide
  VARIANT (1)...(18): Xaa = Any Amino Acid
CCEYCCXXNPACTGCXXY

SEQ ID NO: 1207 - protein, 16 aa, Artificial Sequence
  Synthetically generated peptide
  VARIANT (1)...(16): Xaa = Any Amino Acid
  VARIANT (1)...(16): Xaa = Any Amino Acid
CCEYCCXNXPACTGCY

SEQ ID NO: 1208 - protein, 17 aa, Artificial Sequence
  Synthetically generated peptide
  VARIANT (1)...(17): Xaa = Any Amino Acid
CCEYCCXNXXPACTGCY

SEQ ID NO: 1209 - protein, 18 aa, Artificial Sequence
  Synthetically generated peptide
  VARIANT (1)...(18): Xaa = Any Amino Acid
CCEYCCXNXXXPACTGCY

SEQ ID NO: 1210 - protein, 18 aa, Artificial Sequence
  Synthetically generated peptide
  VARIANT (1)...(18): Xaa = Any Amino Acid
CCEYCCXNXXPXACTGCY

SEQ ID NO: 1211 - protein, 18 aa, Artificial Sequence
  Synthetically generated peptide
  VARIANT (1)...(18): Xaa = Any Amino Acid
CCEYCCXNXXPAXCTGCY

SEQ ID NO: 1212 - protein, 18 aa, Artificial Sequence
  Synthetically generated peptide
  VARIANT (1)...(18): Xaa = Any Amino Acid
CCEYCCXNXXPACXTGCY

SEQ ID NO: 1213 - protein, 18 aa, Artificial Sequence
  Synthetically generated peptide
  VARIANT (1)...(18): Xaa = Any Amino Acid
CCEYCCXNXXPACTXGCY

SEQ ID NO: 1214 - protein, 18 aa, Artificial Sequence
  Synthetically generated peptide
  VARIANT (1)...(18): Xaa = Any Amino Acid
CCEYCCXNXXPACTGXCY

SEQ ID NO: 1215 - protein, 18 aa, Artificial Sequence
  Synthetically generated peptide
  VARIANT (1)...(18): Xaa = Any Amino Acid
CCEYCCXNXXPACTGCXY

SEQ ID NO: 1216 - protein, 17 aa, Artificial Sequence
  Synthetically generated peptide
  VARIANT (1)...(17): Xaa = Any Amino Acid
CCEYCCXNXPXACTGCY

SEQ ID NO: 1217 - protein, 18 aa, Artificial Sequence
  Synthetically generated peptide
  VARIANT (1)...(18): Xaa = Any Amino Acid
CCEYCCXNXPXXACTGCY

SEQ ID NO: 1218 - protein, 18 aa, Artificial Sequence
  Synthetically generated peptide
  VARIANT (1)...(18): Xaa = Any Amino Acid
CCEYCCXNXPXAXCTGCY

SEQ ID NO: 1219 - protein, 18 aa, Artificial Sequence
  Synthetically generated peptide
  VARIANT (1)...(18): Xaa = Any Amino Acid
CCEYCCXNXPXACXTGCY

SEQ ID NO: 1220 - protein, 18 aa, Artificial Sequence
  Synthetically generated peptide
  VARIANT (1)...(18): Xaa = Any Amino Acid
CCEYCCXNXPXACTXGCY

SEQ ID NO: 1221 - protein, 18 aa, Artificial Sequence
  Synthetically generated peptide
  VARIANT (1)...(18): Xaa = Any Amino Acid
CCEYCCXNXPXACTGXCY

SEQ ID NO: 1222 - protein, 18 aa, Artificial Sequence
  Synthetically generated peptide
  VARIANT (1)...(18): Xaa = Any Amino Acid
CCEYCCXNXPXACTGCXY

SEQ ID NO: 1223 - protein, 17 aa, Artificial Sequence
  Synthetically generated peptide
  VARIANT (1)...(17): Xaa = Any Amino Acid
CCEYCCXNXPAXCTGCY

SEQ ID NO: 1224 - protein, 18 aa, Artificial Sequence
  Synthetically generated peptide
  VARIANT (1)...(18): Xaa = Any Amino Acid
CCEYCCXNXPAXXCTGCY

SEQ ID NO: 1225 - protein, 18 aa, Artificial Sequence
  Synthetically generated peptide
  VARIANT (1)...(18): Xaa = Any Amino Acid
CCEYCCXNXPAXCXTGCY

SEQ ID NO: 1226 - protein, 18 aa, Artificial Sequence
  Synthetically generated peptide
  VARIANT (1)...(18): Xaa = Any Amino Acid
CCEYCCXNXPAXCTXGCY

SEQ ID NO: 1227 - protein, 18 aa, Artificial Sequence
  Synthetically generated peptide
  VARIANT (1)...(18): Xaa = Any Amino Acid
CCEYCCXNXPAXCTGXCY

SEQ ID NO: 1228 - protein, 18 aa, Artificial Sequence
  Synthetically generated peptide
  VARIANT (1)...(18): Xaa = Any Amino Acid
CCEYCCXNXPAXCTGCXY

SEQ ID NO: 1229 - protein, 17 aa, Artificial Sequence
  Synthetically generated peptide
  VARIANT (1)...(17): Xaa = Any Amino Acid
CCEYCCXNXPACXTGCY

SEQ ID NO: 1230 - protein, 18 aa, Artificial Sequence
  Synthetically generated peptide
  VARIANT (1)...(18): Xaa = Any Amino Acid
CCEYCCXNXPACXXTGCY

SEQ ID NO: 1231 - protein, 18 aa, Artificial Sequence
  Synthetically generated peptide
  VARIANT (1)...(18): Xaa = Any Amino Acid
CCEYCCXNXPACXTXGCY

SEQ ID NO: 1232 - protein, 18 aa, Artificial Sequence
  Synthetically generated peptide
  VARIANT (1)...(18): Xaa = Any Amino Acid
CCEYCCXNXPACXTGXCY

SEQ ID NO: 1233 - protein, 18 aa, Artificial Sequence
  Synthetically generated peptide
  VARIANT (1)...(18): Xaa = Any Amino Acid
CCEYCCXNXPACXTGCXY

SEQ ID NO: 1234 - protein, 17 aa, Artificial Sequence
  Synthetically generated peptide
  VARIANT (1)...(17): Xaa = Any Amino Acid
CCEYCCXNXPACTXGCY

SEQ ID NO: 1235 - protein, 18 aa, Artificial Sequence
  Synthetically generated peptide
  VARIANT (1)...(18): Xaa = Any Amino Acid
CCEYCCXNXPACTXXGCY

SEQ ID NO: 1236 - protein, 18 aa, Artificial Sequence
  Synthetically generated peptide
  VARIANT (1)...(18): Xaa = Any Amino Acid
CCEYCCXNXPACTXGXCY

SEQ ID NO: 1237 - protein, 18 aa, Artificial Sequence
  Synthetically generated peptide
  VARIANT (1)...(18): Xaa = Any Amino Acid
CCEYCCXNXPACTXGCXY

SEQ ID NO: 1238 - protein, 17 aa, Artificial Sequence
  Synthetically generated peptide
  VARIANT (1)...(17): Xaa = Any Amino Acid
CCEYCCXNXPACTGXCY

SEQ ID NO: 1239 - protein, 18 aa, Artificial Sequence
  Synthetically generated peptide
  VARIANT (1)...(18): Xaa = Any Amino Acid
CCEYCCXNXPACTGXXCY

SEQ ID NO: 1240 - protein, 18 aa, Artificial Sequence
  Synthetically generated peptide
  VARIANT (1)...(18): Xaa = Any Amino Acid
CCEYCCXNXPACTGXCXY

SEQ ID NO: 1241 - protein, 17 aa, Artificial Sequence
  Synthetically generated peptide
  VARIANT (1)...(17): Xaa = Any Amino Acid
CCEYCCXNXPACTGCXY

SEQ ID NO: 1242 - protein, 18 aa, Artificial Sequence
  Synthetically generated peptide
  VARIANT (1)...(18): Xaa = Any Amino Acid
CCEYCCXNXPACTGCXXY

SEQ ID NO: 1243 - protein, 16 aa, Artificial Sequence
  Synthetically generated peptide
  VARIANT (1)...(16): Xaa = Any Amino Acid
  VARIANT (1)...(16): Xaa = Any Amino Acid
CCEYCCXNPXACTGCY

SEQ ID NO: 1244 - protein, 17 aa, Artificial Sequence
  Synthetically generated peptide
  VARIANT (1)...(17): Xaa = Any Amino Acid
CCEYCCXNPXXACTGCY

SEQ ID NO: 1245 - protein, 18 aa, Artificial Sequence
  Synthetically generated peptide
  VARIANT (1)...(18): Xaa = Any Amino Acid
CCEYCCXNPXXXACTGCY

SEQ ID NO: 1246 - protein, 18 aa, Artificial Sequence
  Synthetically generated peptide
  VARIANT (1)...(18): Xaa = Any Amino Acid
CCEYCCXNPXXAXCTGCY

SEQ ID NO: 1247 - protein, 18 aa, Artificial Sequence
  Synthetically generated peptide
  VARIANT (1)...(18): Xaa = Any Amino Acid
CCEYCCXNPXXACXTGCY

SEQ ID NO: 1248 - protein, 18 aa, Artificial Sequence
  Synthetically generated peptide
  VARIANT (1)...(18): Xaa = Any Amino Acid
CCEYCCXNPXXACTXGCY

SEQ ID NO: 1249 - protein, 18 aa, Artificial Sequence
  Synthetically generated peptide
  VARIANT (1)...(18): Xaa = Any Amino Acid
CCEYCCXNPXXACTGXCY

SEQ ID NO: 1250 - protein, 18 aa, Artificial Sequence
  Synthetically generated peptide
  VARIANT (1)...(18): Xaa = Any Amino Acid
CCEYCCXNPXXACTGCXY

SEQ ID NO: 1251 - protein, 17 aa, Artificial Sequence
  Synthetically generated peptide
  VARIANT (1)...(17): Xaa = Any Amino Acid
CCEYCCXNPXAXCTGCY

SEQ ID NO: 1252 - protein, 18 aa, Artificial Sequence
  Synthetically generated peptide
  VARIANT (1)...(18): Xaa = Any Amino Acid
CCEYCCXNPXAXXCTGCY

SEQ ID NO: 1253 - protein, 18 aa, Artificial Sequence
  Synthetically generated peptide
  VARIANT (1)...(18): Xaa = Any Amino Acid
CCEYCCXNPXAXCXTGCY

SEQ ID NO: 1254 - protein, 18 aa, Artificial Sequence
  Synthetically generated peptide
  VARIANT (1)...(18): Xaa = Any Amino Acid
CCEYCCXNPXAXCTXGCY

SEQ ID NO: 1255 - protein, 18 aa, Artificial Sequence
  Synthetically generated peptide
  VARIANT (1)...(18): Xaa = Any Amino Acid
CCEYCCXNPXAXCTGXCY

SEQ ID NO: 1256 - protein, 18 aa, Artificial Sequence
  Synthetically generated peptide
  VARIANT (1)...(18): Xaa = Any Amino Acid
CCEYCCXNPXAXCTGCXY

SEQ ID NO: 1257 - protein, 17 aa, Artificial Sequence
  Synthetically generated peptide
  VARIANT (1)...(17): Xaa = Any Amino Acid
CCEYCCXNPXACXTGCY

SEQ ID NO: 1258 - protein, 18 aa, Artificial Sequence
  Synthetically generated peptide
  VARIANT (1)...(18): Xaa = Any Amino Acid
CCEYCCXNPXACXXTGCY

SEQ ID NO: 1259 - protein, 18 aa, Artificial Sequence
  Synthetically generated peptide
  VARIANT (1)...(18): Xaa = Any Amino Acid
CCEYCCXNPXACXTXGCY

SEQ ID NO: 1260 - protein, 18 aa, Artificial Sequence
  Synthetically generated peptide
  VARIANT (1)...(18): Xaa = Any Amino Acid
CCEYCCXNPXACXTGXCY

SEQ ID NO: 1261 - protein, 18 aa, Artificial Sequence
  Synthetically generated peptide
  VARIANT (1)...(18): Xaa = Any Amino Acid
CCEYCCXNPXACXTGCXY

SEQ ID NO: 1262 - protein, 17 aa, Artificial Sequence
  Synthetically generated peptide
  VARIANT (1)...(17): Xaa = Any Amino Acid
CCEYCCXNPXACTXGCY

SEQ ID NO: 1263 - protein, 18 aa, Artificial Sequence
  Synthetically generated peptide
  VARIANT (1)...(18): Xaa = Any Amino Acid
CCEYCCXNPXACTXXGCY

SEQ ID NO: 1264 - protein, 18 aa, Artificial Sequence
  Synthetically generated peptide
  VARIANT (1)...(18): Xaa = Any Amino Acid
CCEYCCXNPXACTXGXCY

SEQ ID NO: 1265 - protein, 18 aa, Artificial Sequence
  Synthetically generated peptide
  VARIANT (1)...(18): Xaa = Any Amino Acid
CCEYCCXNPXACTXGCXY

SEQ ID NO: 1266 - protein, 17 aa, Artificial Sequence
  Synthetically generated peptide
  VARIANT (1)...(17): Xaa = Any Amino Acid
CCEYCCXNPXACTGXCY

SEQ ID NO: 1267 - protein, 18 aa, Artificial Sequence
  Synthetically generated peptide
  VARIANT (1)...(18): Xaa = Any Amino Acid
CCEYCCXNPXACTGXXCY

SEQ ID NO: 1268 - protein, 18 aa, Artificial Sequence
  Synthetically generated peptide
  VARIANT (1)...(18): Xaa = Any Amino Acid
CCEYCCXNPXACTGXCXY

SEQ ID NO: 1269 - protein, 17 aa, Artificial Sequence
  Synthetically generated peptide
  VARIANT (1)...(17): Xaa = Any Amino Acid
CCEYCCXNPXACTGCXY

SEQ ID NO: 1270 - protein, 18 aa, Artificial Sequence
  Synthetically generated peptide
  VARIANT (1)...(18): Xaa = Any Amino Acid
CCEYCCXNPXACTGCXXY

SEQ ID NO: 1271 - protein, 16 aa, Artificial Sequence
  Synthetically generated peptide
  VARIANT (1)...(16): Xaa = Any Amino Acid
  VARIANT (1)...(16): Xaa = Any Amino Acid
CCEYCCXNPAXCTGCY

SEQ ID NO: 1272 - protein, 17 aa, Artificial Sequence
  Synthetically generated peptide
  VARIANT (1)...(17): Xaa = Any Amino Acid
CCEYCCXNPAXXCTGCY

SEQ ID NO: 1273 - protein, 18 aa, Artificial Sequence
  Synthetically generated peptide
  VARIANT (1)...(18): Xaa = Any Amino Acid
CCEYCCXNPAXXXCTGCY

SEQ ID NO: 1274 - protein, 18 aa, Artificial Sequence
  Synthetically generated peptide
  VARIANT (1)...(18): Xaa = Any Amino Acid
CCEYCCXNPAXXCXTGCY

SEQ ID NO: 1275 - protein, 18 aa, Artificial Sequence
  Synthetically generated peptide
  VARIANT (1)...(18): Xaa = Any Amino Acid
CCEYCCXNPAXXCTXGCY

SEQ ID NO: 1276 - protein, 18 aa, Artificial Sequence
  Synthetically generated peptide
  VARIANT (1)...(18): Xaa = Any Amino Acid
CCEYCCXNPAXXCTGXCY

SEQ ID NO: 1277 - protein, 18 aa, Artificial Sequence
  Synthetically generated peptide
  VARIANT (1)...(18): Xaa = Any Amino Acid
CCEYCCXNPAXXCTGCXY

SEQ ID NO: 1278 - protein, 17 aa, Artificial Sequence
  Synthetically generated peptide
  VARIANT (1)...(17): Xaa = Any Amino Acid
CCEYCCXNPAXCXTGCY

SEQ ID NO: 1279 - protein, 18 aa, Artificial Sequence
  Synthetically generated peptide
  VARIANT (1)...(18): Xaa = Any Amino Acid
CCEYCCXNPAXCXXTGCY

SEQ ID NO: 1280 - protein, 18 aa, Artificial Sequence
  Synthetically generated peptide
  VARIANT (1)...(18): Xaa = Any Amino Acid
CCEYCCXNPAXCXTXGCY

SEQ ID NO: 1281 - protein, 18 aa, Artificial Sequence
  Synthetically generated peptide
  VARIANT (1)...(18): Xaa = Any Amino Acid
CCEYCCXNPAXCXTGXCY

SEQ ID NO: 1282 - protein, 18 aa, Artificial Sequence
  Synthetically generated peptide
  VARIANT (1)...(18): Xaa = Any Amino Acid
CCEYCCXNPAXCXTGCXY

SEQ ID NO: 1283 - protein, 17 aa, Artificial Sequence
  Synthetically generated peptide
  VARIANT (1)...(17): Xaa = Any Amino Acid
CCEYCCXNPAXCTXGCY

SEQ ID NO: 1284 - protein, 18 aa, Artificial Sequence
  Synthetically generated peptide
  VARIANT (1)...(18): Xaa = Any Amino Acid
CCEYCCXNPAXCTXXGCY

SEQ ID NO: 1285 - protein, 18 aa, Artificial Sequence
  Synthetically generated peptide
  VARIANT (1)...(18): Xaa = Any Amino Acid
CCEYCCXNPAXCTXGXCY

SEQ ID NO: 1286 - protein, 18 aa, Artificial Sequence
  Synthetically generated peptide
  VARIANT (1)...(18): Xaa = Any Amino Acid
CCEYCCXNPAXCTXGCXY

SEQ ID NO: 1287 - protein, 17 aa, Artificial Sequence
  Synthetically generated peptide
  VARIANT (1)...(17): Xaa = Any Amino Acid
CCEYCCXNPAXCTGXCY

SEQ ID NO: 1288 - protein, 18 aa, Artificial Sequence
  Synthetically generated peptide
  VARIANT (1)...(18): Xaa = Any Amino Acid
CCEYCCXNPAXCTGXXCY

SEQ ID NO: 1289 - protein, 18 aa, Artificial Sequence
  Synthetically generated peptide
  VARIANT (1)...(18): Xaa = Any Amino Acid
CCEYCCXNPAXCTGXCXY

SEQ ID NO: 1290 - protein, 17 aa, Artificial Sequence
  Synthetically generated peptide
  VARIANT (1)...(17): Xaa = Any Amino Acid
CCEYCCXNPAXCTGCXY

SEQ ID NO: 1291 - protein, 18 aa, Artificial Sequence
  Synthetically generated peptide
  VARIANT (1)...(18): Xaa = Any Amino Acid
CCEYCCXNPAXCTGCXXY

SEQ ID NO: 1292 - protein, 16 aa, Artificial Sequence
  Synthetically generated peptide
  VARIANT (1)...(16): Xaa = Any Amino Acid
  VARIANT (1)...(16): Xaa = Any Amino Acid
CCEYCCXNPACXTGCY

SEQ ID NO: 1293 - protein, 17 aa, Artificial Sequence
  Synthetically generated peptide
  VARIANT (1)...(17): Xaa = Any Amino Acid
CCEYCCXNPACXXTGCY

SEQ ID NO: 1294 - protein, 18 aa, Artificial Sequence
  Synthetically generated peptide
  VARIANT (1)...(18): Xaa = Any Amino Acid
CCEYCCXNPACXXXTGCY

SEQ ID NO: 1295 - protein, 18 aa, Artificial Sequence
  Synthetically generated peptide
  VARIANT (1)...(18): Xaa = Any Amino Acid
CCEYCCXNPACXXTXGCY

SEQ ID NO: 1296 - protein, 18 aa, Artificial Sequence
  Synthetically generated peptide
  VARIANT (1)...(18): Xaa = Any Amino Acid
CCEYCCXNPACXXTGXCY

SEQ ID NO: 1297 - protein, 18 aa, Artificial Sequence
  Synthetically generated peptide
  VARIANT (1)...(18): Xaa = Any Amino Acid
CCEYCCXNPACXXTGCXY

SEQ ID NO: 1298 - protein, 17 aa, Artificial Sequence
  Synthetically generated peptide
  VARIANT (1)...(17): Xaa = Any Amino Acid
CCEYCCXNPACXTXGCY

SEQ ID NO: 1299 - protein, 18 aa, Artificial Sequence
  Synthetically generated peptide
  VARIANT (1)...(18): Xaa = Any Amino Acid
CCEYCCXNPACXTXXGCY

SEQ ID NO: 1300 - protein, 18 aa, Artificial Sequence
  Synthetically generated peptide
  VARIANT (1)...(18): Xaa = Any Amino Acid
CCEYCCXNPACXTXGXCY

SEQ ID NO: 1301 - protein, 18 aa, Artificial Sequence
  Synthetically generated peptide
  VARIANT (1)...(18): Xaa = Any Amino Acid
CCEYCCXNPACXTXGCXY

SEQ ID NO: 1302 - protein, 17 aa, Artificial Sequence
  Synthetically generated peptide
  VARIANT (1)...(17): Xaa = Any Amino Acid
CCEYCCXNPACXTGXCY

SEQ ID NO: 1303 - protein, 18 aa, Artificial Sequence
  Synthetically generated peptide
  VARIANT (1)...(18): Xaa = Any Amino Acid
CCEYCCXNPACXTGXXCY

SEQ ID NO: 1304 - protein, 18 aa, Artificial Sequence
  Synthetically generated peptide
  VARIANT (1)...(18): Xaa = Any Amino Acid
CCEYCCXNPACXTGXCXY

SEQ ID NO: 1305 - protein, 17 aa, Artificial Sequence
  Synthetically generated peptide
  VARIANT (1)...(17): Xaa = Any Amino Acid
CCEYCCXNPACXTGCXY

SEQ ID NO: 1306 - protein, 18 aa, Artificial Sequence
  Synthetically generated peptide
  VARIANT (1)...(18): Xaa = Any Amino Acid
CCEYCCXNPACXTGCXXY

SEQ ID NO: 1307 - protein, 16 aa, Artificial Sequence
  Synthetically generated peptide
  VARIANT (1)...(16): Xaa = Any Amino Acid
  VARIANT (1)...(16): Xaa = Any Amino Acid
CCEYCCXNPACTXGCY

SEQ ID NO: 1308 - protein, 17 aa, Artificial Sequence
  Synthetically generated peptide
  VARIANT (1)...(17): Xaa = Any Amino Acid
CCEYCCXNPACTXXGCY

SEQ ID NO: 1309 - protein, 18 aa, Artificial Sequence
  Synthetically generated peptide
  VARIANT (1)...(18): Xaa = Any Amino Acid
CCEYCCXNPACTXXXGCY

SEQ ID NO: 1310 - protein, 18 aa, Artificial Sequence
  Synthetically generated peptide
  VARIANT (1)...(18): Xaa = Any Amino Acid
CCEYCCXNPACTXXGXCY

SEQ ID NO: 1311 - protein, 18 aa, Artificial Sequence
  Synthetically generated peptide
  VARIANT (1)...(18): Xaa = Any Amino Acid
CCEYCCXNPACTXXGCXY

SEQ ID NO: 1312 - protein, 17 aa, Artificial Sequence
  Synthetically generated peptide
  VARIANT (1)...(17): Xaa = Any Amino Acid
CCEYCCXNPACTXGXCY

SEQ ID NO: 1313 - protein, 18 aa, Artificial Sequence
  Synthetically generated peptide
  VARIANT (1)...(18): Xaa = Any Amino Acid
CCEYCCXNPACTXGXXCY

SEQ ID NO: 1314 - protein, 18 aa, Artificial Sequence
  Synthetically generated peptide
  VARIANT (1)...(18): Xaa = Any Amino Acid
CCEYCCXNPACTXGXCXY

SEQ ID NO: 1315 - protein, 17 aa, Artificial Sequence
  Synthetically generated peptide
  VARIANT (1)...(17): Xaa = Any Amino Acid
CCEYCCXNPACTXGCXY

SEQ ID NO: 1316 - protein, 18 aa, Artificial Sequence
  Synthetically generated peptide
  VARIANT (1)...(18): Xaa = Any Amino Acid
CCEYCCXNPACTXGCXXY

SEQ ID NO: 1317 - protein, 16 aa, Artificial Sequence
  Synthetically generated peptide
  VARIANT (1)...(16): Xaa = Any Amino Acid
  VARIANT (1)...(16): Xaa = Any Amino Acid
CCEYCCXNPACTGXCY

SEQ ID NO: 1318 - protein, 17 aa, Artificial Sequence
  Synthetically generated peptide
  VARIANT (1)...(17): Xaa = Any Amino Acid
CCEYCCXNPACTGXXCY

SEQ ID NO: 1319 - protein, 18 aa, Artificial Sequence
  Synthetically generated peptide
  VARIANT (1)...(18): Xaa = Any Amino Acid
CCEYCCXNPACTGXXXCY

SEQ ID NO: 1320 - protein, 18 aa, Artificial Sequence
  Synthetically generated peptide
  VARIANT (1)...(18): Xaa = Any Amino Acid
CCEYCCXNPACTGXXCXY

SEQ ID NO: 1321 - protein, 17 aa, Artificial Sequence
  Synthetically generated peptide
  VARIANT (1)...(17): Xaa = Any Amino Acid
CCEYCCXNPACTGXCXY

SEQ ID NO: 1322 - protein, 18 aa, Artificial Sequence
  Synthetically generated peptide
  VARIANT (1)...(18): Xaa = Any Amino Acid
CCEYCCXNPACTGXCXXY

SEQ ID NO: 1323 - protein, 16 aa, Artificial Sequence
  Synthetically generated peptide
  VARIANT (1)...(16): Xaa = Any Amino Acid
  VARIANT (1)...(16): Xaa = Any Amino Acid
CCEYCCXNPACTGCXY

SEQ ID NO: 1324 - protein, 17 aa, Artificial Sequence
  Synthetically generated peptide
  VARIANT (1)...(17): Xaa = Any Amino Acid
CCEYCCXNPACTGCXXY

SEQ ID NO: 1325 - protein, 18 aa, Artificial Sequence
  Synthetically generated peptide
  VARIANT (1)...(18): Xaa = Any Amino Acid
CCEYCCXNPACTGCXXXY

SEQ ID NO: 1326 - protein, 15 aa, Artificial Sequence
  Synthetically generated peptide
  VARIANT (1)...(15): Xaa = Any Amino Acid
  VARIANT (1)...(15): Xaa = Any Amino Acid
CCEYCCNXPACTGCY

SEQ ID NO: 1327 - protein, 16 aa, Artificial Sequence
  Synthetically generated peptide
  VARIANT (1)...(16): Xaa = Any Amino Acid
  VARIANT (1)...(16): Xaa = Any Amino Acid
CCEYCCNXXPACTGCY

SEQ ID NO: 1328 - protein, 17 aa, Artificial Sequence
  Synthetically generated peptide
  VARIANT (1)...(17): Xaa = Any Amino Acid
CCEYCCNXXXPACTGCY

SEQ ID NO: 1329 - protein, 18 aa, Artificial Sequence
  Synthetically generated peptide
  VARIANT (1)...(18): Xaa = Any Amino Acid
CCEYCCNXXXXPACTGCY

SEQ ID NO: 1330 - protein, 18 aa, Artificial Sequence
  Synthetically generated peptide
  VARIANT (1)...(18): Xaa = Any Amino Acid
CCEYCCNXXXPXACTGCY

SEQ ID NO: 1331 - protein, 18 aa, Artificial Sequence
  Synthetically generated peptide
  VARIANT (1)...(18): Xaa = Any Amino Acid
CCEYCCNXXXPAXCTGCY

SEQ ID NO: 1332 - protein, 18 aa, Artificial Sequence
  Synthetically generated peptide
  VARIANT (1)...(18): Xaa = Any Amino Acid
CCEYCCNXXXPACXTGCY

SEQ ID NO: 1333 - protein, 18 aa, Artificial Sequence
  Synthetically generated peptide
  VARIANT (1)...(18): Xaa = Any Amino Acid
CCEYCCNXXXPACTXGCY

SEQ ID NO: 1334 - protein, 18 aa, Artificial Sequence
  Synthetically generated peptide
  VARIANT (1)...(18): Xaa = Any Amino Acid
CCEYCCNXXXPACTGXCY

SEQ ID NO: 1335 - protein, 18 aa, Artificial Sequence
  Synthetically generated peptide
  VARIANT (1)...(18): Xaa = Any Amino Acid
CCEYCCNXXXPACTGCXY

SEQ ID NO: 1336 - protein, 17 aa, Artificial Sequence
  Synthetically generated peptide
  VARIANT (1)...(17): Xaa = Any Amino Acid
CCEYCCNXXPXACTGCY

SEQ ID NO: 1337 - protein, 18 aa, Artificial Sequence
  Synthetically generated peptide
  VARIANT (1)...(18): Xaa = Any Amino Acid
CCEYCCNXXPXXACTGCY

SEQ ID NO: 1338 - protein, 18 aa, Artificial Sequence
  Synthetically generated peptide
  VARIANT (1)...(18): Xaa = Any Amino Acid
CCEYCCNXXPXAXCTGCY

SEQ ID NO: 1339 - protein, 18 aa, Artificial Sequence
  Synthetically generated peptide
  VARIANT (1)...(18): Xaa = Any Amino Acid
CCEYCCNXXPXACXTGCY

SEQ ID NO: 1340 - protein, 18 aa, Artificial Sequence
  Synthetically generated peptide
  VARIANT (1)...(18): Xaa = Any Amino Acid
CCEYCCNXXPXACTXGCY

SEQ ID NO: 1341 - protein, 18 aa, Artificial Sequence
  Synthetically generated peptide
  VARIANT (1)...(18): Xaa = Any Amino Acid
CCEYCCNXXPXACTGXCY

SEQ ID NO: 1342 - protein, 18 aa, Artificial Sequence
  Synthetically generated peptide
  VARIANT (1)...(18): Xaa = Any Amino Acid
CCEYCCNXXPXACTGCXY

SEQ ID NO: 1343 - protein, 17 aa, Artificial Sequence
  Synthetically generated peptide
  VARIANT (1)...(17): Xaa = Any Amino Acid
CCEYCCNXXPAXCTGCY

SEQ ID NO: 1344 - protein, 18 aa, Artificial Sequence
  Synthetically generated peptide
  VARIANT (1)...(18): Xaa = Any Amino Acid
CCEYCCNXXPAXXCTGCY

SEQ ID NO: 1345 - protein, 18 aa, Artificial Sequence
  Synthetically generated peptide
  VARIANT (1)...(18): Xaa = Any Amino Acid
CCEYCCNXXPAXCXTGCY

SEQ ID NO: 1346 - protein, 18 aa, Artificial Sequence
  Synthetically generated peptide
  VARIANT (1)...(18): Xaa = Any Amino Acid
CCEYCCNXXPAXCTXGCY

SEQ ID NO: 1347 - protein, 18 aa, Artificial Sequence
  Synthetically generated peptide
  VARIANT (1)...(18): Xaa = Any Amino Acid
CCEYCCNXXPAXCTGXCY

SEQ ID NO: 1348 - protein, 18 aa, Artificial Sequence
  Synthetically generated peptide
  VARIANT (1)...(18): Xaa = Any Amino Acid
CCEYCCNXXPAXCTGCXY

SEQ ID NO: 1349 - protein, 17 aa, Artificial Sequence
  Synthetically generated peptide
  VARIANT (1)...(17): Xaa = Any Amino Acid
CCEYCCNXXPACXTGCY

SEQ ID NO: 1350 - protein, 18 aa, Artificial Sequence
  Synthetically generated peptide
  VARIANT (1)...(18): Xaa = Any Amino Acid
CCEYCCNXXPACXXTGCY

SEQ ID NO: 1351 - protein, 18 aa, Artificial Sequence
  Synthetically generated peptide
  VARIANT (1)...(18): Xaa = Any Amino Acid
CCEYCCNXXPACXTXGCY

SEQ ID NO: 1352 - protein, 18 aa, Artificial Sequence
  Synthetically generated peptide
  VARIANT (1)...(18): Xaa = Any Amino Acid
CCEYCCNXXPACXTGXCY

SEQ ID NO: 1353 - protein, 18 aa, Artificial Sequence
  Synthetically generated peptide
  VARIANT (1)...(18): Xaa = Any Amino Acid
CCEYCCNXXPACXTGCXY

SEQ ID NO: 1354 - protein, 17 aa, Artificial Sequence
  Synthetically generated peptide
  VARIANT (1)...(17): Xaa = Any Amino Acid
CCEYCCNXXPACTXGCY

SEQ ID NO: 1355 - protein, 18 aa, Artificial Sequence
  Synthetically generated peptide
  VARIANT (1)...(18): Xaa = Any Amino Acid
CCEYCCNXXPACTXXGCY

SEQ ID NO: 1356 - protein, 18 aa, Artificial Sequence
  Synthetically generated peptide
  VARIANT (1)...(18): Xaa = Any Amino Acid
CCEYCCNXXPACTXGXCY

SEQ ID NO: 1357 - protein, 18 aa, Artificial Sequence
  Synthetically generated peptide
  VARIANT (1)...(18): Xaa = Any Amino Acid
CCEYCCNXXPACTXGCXY

SEQ ID NO: 1358 - protein, 17 aa, Artificial Sequence
  Synthetically generated peptide
  VARIANT (1)...(17): Xaa = Any Amino Acid
CCEYCCNXXPACTGXCY

SEQ ID NO: 1359 - protein, 18 aa, Artificial Sequence
  Synthetically generated peptide
  VARIANT (1)...(18): Xaa = Any Amino Acid
CCEYCCNXXPACTGXXCY

SEQ ID NO: 1360 - protein, 18 aa, Artificial Sequence
  Synthetically generated peptide
  VARIANT (1)...(18): Xaa = Any Amino Acid
CCEYCCNXXPACTGXCXY

SEQ ID NO: 1361 - protein, 17 aa, Artificial Sequence
  Synthetically generated peptide
  VARIANT (1)...(17): Xaa = Any Amino Acid
CCEYCCNXXPACTGCXY

SEQ ID NO: 1362 - protein, 18 aa, Artificial Sequence
  Synthetically generated peptide
  VARIANT (1)...(18): Xaa = Any Amino Acid
CCEYCCNXXPACTGCXXY

SEQ ID NO: 1363 - protein, 16 aa, Artificial Sequence
  Synthetically generated peptide
  VARIANT (1)...(16): Xaa = Any Amino Acid
  VARIANT (1)...(16): Xaa = Any Amino Acid
CCEYCCNXPXACTGCY

SEQ ID NO: 1364 - protein, 17 aa, Artificial Sequence
  Synthetically generated peptide
  VARIANT (1)...(17): Xaa = Any Amino Acid
CCEYCCNXPXXACTGCY

SEQ ID NO: 1365 - protein, 18 aa, Artificial Sequence
  Synthetically generated peptide
  VARIANT (1)...(18): Xaa = Any Amino Acid
CCEYCCNXPXXXACTGCY

SEQ ID NO: 1366 - protein, 18 aa, Artificial Sequence
  Synthetically generated peptide
  VARIANT (1)...(18): Xaa = Any Amino Acid
CCEYCCNXPXXAXCTGCY

SEQ ID NO: 1367 - protein, 18 aa, Artificial Sequence
  Synthetically generated peptide
  VARIANT (1)...(18): Xaa = Any Amino Acid
CCEYCCNXPXXACXTGCY

SEQ ID NO: 1368 - protein, 18 aa, Artificial Sequence
  Synthetically generated peptide
  VARIANT (1)...(18): Xaa = Any Amino Acid
CCEYCCNXPXXACTXGCY

SEQ ID NO: 1369 - protein, 18 aa, Artificial Sequence
  Synthetically generated peptide
  VARIANT (1)...(18): Xaa = Any Amino Acid
CCEYCCNXPXXACTGXCY

SEQ ID NO: 1370 - protein, 18 aa, Artificial Sequence
  Synthetically generated peptide
  VARIANT (1)...(18): Xaa = Any Amino Acid
CCEYCCNXPXXACTGCXY

SEQ ID NO: 1371 - protein, 17 aa, Artificial Sequence
  Synthetically generated peptide
  VARIANT (1)...(17): Xaa = Any Amino Acid
CCEYCCNXPXAXCTGCY

SEQ ID NO: 1372 - protein, 18 aa, Artificial Sequence
  Synthetically generated peptide
  VARIANT (1)...(18): Xaa = Any Amino Acid
CCEYCCNXPXAXXCTGCY

SEQ ID NO: 1373 - protein, 18 aa, Artificial Sequence
  Synthetically generated peptide
  VARIANT (1)...(18): Xaa = Any Amino Acid
CCEYCCNXPXAXCXTGCY

SEQ ID NO: 1374 - protein, 18 aa, Artificial Sequence
  Synthetically generated peptide
  VARIANT (1)...(18): Xaa = Any Amino Acid
CCEYCCNXPXAXCTXGCY

SEQ ID NO: 1375 - protein, 18 aa, Artificial Sequence
  Synthetically generated peptide
  VARIANT (1)...(18): Xaa = Any Amino Acid
CCEYCCNXPXAXCTGXCY

SEQ ID NO: 1376 - protein, 18 aa, Artificial Sequence
  Synthetically generated peptide
  VARIANT (1)...(18): Xaa = Any Amino Acid
CCEYCCNXPXAXCTGCXY

SEQ ID NO: 1377 - protein, 17 aa, Artificial Sequence
  Synthetically generated peptide
  VARIANT (1)...(17): Xaa = Any Amino Acid
CCEYCCNXPXACXTGCY

SEQ ID NO: 1378 - protein, 18 aa, Artificial Sequence
  Synthetically generated peptide
  VARIANT (1)...(18): Xaa = Any Amino Acid
CCEYCCNXPXACXXTGCY

SEQ ID NO: 1379 - protein, 18 aa, Artificial Sequence
  Synthetically generated peptide
  VARIANT (1)...(18): Xaa = Any Amino Acid
CCEYCCNXPXACXTXGCY

SEQ ID NO: 1380 - protein, 18 aa, Artificial Sequence
  Synthetically generated peptide
  VARIANT (1)...(18): Xaa = Any Amino Acid
CCEYCCNXPXACXTGXCY

SEQ ID NO: 1381 - protein, 18 aa, Artificial Sequence
  Synthetically generated peptide
  VARIANT (1)...(18): Xaa = Any Amino Acid
CCEYCCNXPXACXTGCXY

SEQ ID NO: 1382 - protein, 17 aa, Artificial Sequence
  Synthetically generated peptide
  VARIANT (1)...(17): Xaa = Any Amino Acid
CCEYCCNXPXACTXGCY

SEQ ID NO: 1383 - protein, 18 aa, Artificial Sequence
  Synthetically generated peptide
  VARIANT (1)...(18): Xaa = Any Amino Acid
CCEYCCNXPXACTXXGCY

SEQ ID NO: 1384 - protein, 18 aa, Artificial Sequence
  Synthetically generated peptide
  VARIANT (1)...(18): Xaa = Any Amino Acid
CCEYCCNXPXACTXGXCY

SEQ ID NO: 1385 - protein, 18 aa, Artificial Sequence
  Synthetically generated peptide
  VARIANT (1)...(18): Xaa = Any Amino Acid
CCEYCCNXPXACTXGCXY

SEQ ID NO: 1386 - protein, 17 aa, Artificial Sequence
  Synthetically generated peptide
  VARIANT (1)...(17): Xaa = Any Amino Acid
CCEYCCNXPXACTGXCY

SEQ ID NO: 1387 - protein, 18 aa, Artificial Sequence
  Synthetically generated peptide
  VARIANT (1)...(18): Xaa = Any Amino Acid
CCEYCCNXPXACTGXXCY

SEQ ID NO: 1388 - protein, 18 aa, Artificial Sequence
  Synthetically generated peptide
  VARIANT (1)...(18): Xaa = Any Amino Acid
CCEYCCNXPXACTGXCXY

SEQ ID NO: 1389 - protein, 17 aa, Artificial Sequence
  Synthetically generated peptide
  VARIANT (1)...(17): Xaa = Any Amino Acid
CCEYCCNXPXACTGCXY

SEQ ID NO: 1390 - protein, 18 aa, Artificial Sequence
  Synthetically generated peptide
  VARIANT (1)...(18): Xaa = Any Amino Acid
CCEYCCNXPXACTGCXXY

SEQ ID NO: 1391 - protein, 16 aa, Artificial Sequence
  Synthetically generated peptide
  VARIANT (1)...(16): Xaa = Any Amino Acid
  VARIANT (1)...(16): Xaa = Any Amino Acid
CCEYCCNXPAXCTGCY

SEQ ID NO: 1392 - protein, 17 aa, Artificial Sequence
  Synthetically generated peptide
  VARIANT (1)...(17): Xaa = Any Amino Acid
CCEYCCNXPAXXCTGCY

SEQ ID NO: 1393 - protein, 18 aa, Artificial Sequence
  Synthetically generated peptide
  VARIANT (1)...(18): Xaa = Any Amino Acid
CCEYCCNXPAXXXCTGCY

SEQ ID NO: 1394 - protein, 18 aa, Artificial Sequence
  Synthetically generated peptide
  VARIANT (1)...(18): Xaa = Any Amino Acid
CCEYCCNXPAXXCXTGCY

SEQ ID NO: 1395 - protein, 18 aa, Artificial Sequence
  Synthetically generated peptide
  VARIANT (1)...(18): Xaa = Any Amino Acid
CCEYCCNXPAXXCTXGCY

SEQ ID NO: 1396 - protein, 18 aa, Artificial Sequence
  Synthetically generated peptide
  VARIANT (1)...(18): Xaa = Any Amino Acid
CCEYCCNXPAXXCTGXCY

SEQ ID NO: 1397 - protein, 18 aa, Artificial Sequence
  Synthetically generated peptide
  VARIANT (1)...(18): Xaa = Any Amino Acid
CCEYCCNXPAXXCTGCXY

SEQ ID NO: 1398 - protein, 17 aa, Artificial Sequence
  Synthetically generated peptide
  VARIANT (1)...(17): Xaa = Any Amino Acid
CCEYCCNXPAXCXTGCY

SEQ ID NO: 1399 - protein, 18 aa, Artificial Sequence
  Synthetically generated peptide
  VARIANT (1)...(18): Xaa = Any Amino Acid
CCEYCCNXPAXCXXTGCY

SEQ ID NO: 1400 - protein, 18 aa, Artificial Sequence
  Synthetically generated peptide
  VARIANT (1)...(18): Xaa = Any Amino Acid
CCEYCCNXPAXCXTXGCY

SEQ ID NO: 1401 - protein, 18 aa, Artificial Sequence
  Synthetically generated peptide
  VARIANT (1)...(18): Xaa = Any Amino Acid
CCEYCCNXPAXCXTGXCY

SEQ ID NO: 1402 - protein, 18 aa, Artificial Sequence
  Synthetically generated peptide
  VARIANT (1)...(18): Xaa = Any Amino Acid
CCEYCCNXPAXCXTGCXY

SEQ ID NO: 1403 - protein, 17 aa, Artificial Sequence
  Synthetically generated peptide
  VARIANT (1)...(17): Xaa = Any Amino Acid
CCEYCCNXPAXCTXGCY

SEQ ID NO: 1404 - protein, 18 aa, Artificial Sequence
  Synthetically generated peptide
  VARIANT (1)...(18): Xaa = Any Amino Acid
CCEYCCNXPAXCTXXGCY

SEQ ID NO: 1405 - protein, 18 aa, Artificial Sequence
  Synthetically generated peptide
  VARIANT (1)...(18): Xaa = Any Amino Acid
CCEYCCNXPAXCTXGXCY

SEQ ID NO: 1406 - protein, 18 aa, Artificial Sequence
  Synthetically generated peptide
  VARIANT (1)...(18): Xaa = Any Amino Acid
CCEYCCNXPAXCTXGCXY

SEQ ID NO: 1407 - protein, 17 aa, Artificial Sequence
  Synthetically generated peptide
  VARIANT (1)...(17): Xaa = Any Amino Acid
CCEYCCNXPAXCTGXCY

SEQ ID NO: 1408 - protein, 18 aa, Artificial Sequence
  Synthetically generated peptide
  VARIANT (1)...(18): Xaa = Any Amino Acid
CCEYCCNXPAXCTGXXCY

SEQ ID NO: 1409 - protein, 18 aa, Artificial Sequence
  Synthetically generated peptide
  VARIANT (1)...(18): Xaa = Any Amino Acid
CCEYCCNXPAXCTGXCXY

SEQ ID NO: 1410 - protein, 17 aa, Artificial Sequence
  Synthetically generated peptide
  VARIANT (1)...(17): Xaa = Any Amino Acid
CCEYCCNXPAXCTGCXY

SEQ ID NO: 1411 - protein, 18 aa, Artificial Sequence
  Synthetically generated peptide
  VARIANT (1)...(18): Xaa = Any Amino Acid
CCEYCCNXPAXCTGCXXY

SEQ ID NO: 1412 - protein, 16 aa, Artificial Sequence
  Synthetically generated peptide
  VARIANT (1)...(16): Xaa = Any Amino Acid
  VARIANT (1)...(16): Xaa = Any Amino Acid
CCEYCCNXPACXTGCY

SEQ ID NO: 1413 - protein, 17 aa, Artificial Sequence
  Synthetically generated peptide
  VARIANT (1)...(17): Xaa = Any Amino Acid
CCEYCCNXPACXXTGCY

SEQ ID NO: 1414 - protein, 18 aa, Artificial Sequence
  Synthetically generated peptide
  VARIANT (1)...(18): Xaa = Any Amino Acid
CCEYCCNXPACXXXTGCY

SEQ ID NO: 1415 - protein, 18 aa, Artificial Sequence
  Synthetically generated peptide
  VARIANT (1)...(18): Xaa = Any Amino Acid
CCEYCCNXPACXXTXGCY

SEQ ID NO: 1416 - protein, 18 aa, Artificial Sequence
  Synthetically generated peptide
  VARIANT (1)...(18): Xaa = Any Amino Acid
CCEYCCNXPACXXTGXCY

SEQ ID NO: 1417 - protein, 18 aa, Artificial Sequence
  Synthetically generated peptide
  VARIANT (1)...(18): Xaa = Any Amino Acid
CCEYCCNXPACXXTGCXY

SEQ ID NO: 1418 - protein, 17 aa, Artificial Sequence
  Synthetically generated peptide
  VARIANT (1)...(17): Xaa = Any Amino Acid
CCEYCCNXPACXTXGCY

SEQ ID NO: 1419 - protein, 18 aa, Artificial Sequence
  Synthetically generated peptide
  VARIANT (1)...(18): Xaa = Any Amino Acid
CCEYCCNXPACXTXXGCY

SEQ ID NO: 1420 - protein, 18 aa, Artificial Sequence
  Synthetically generated peptide
  VARIANT (1)...(18): Xaa = Any Amino Acid
CCEYCCNXPACXTXGXCY

SEQ ID NO: 1421 - protein, 18 aa, Artificial Sequence
  Synthetically generated peptide
  VARIANT (1)...(18): Xaa = Any Amino Acid
CCEYCCNXPACXTXGCXY

SEQ ID NO: 1422 - protein, 17 aa, Artificial Sequence
  Synthetically generated peptide
  VARIANT (1)...(17): Xaa = Any Amino Acid
CCEYCCNXPACXTGXCY

SEQ ID NO: 1423 - protein, 18 aa, Artificial Sequence
  Synthetically generated peptide
  VARIANT (1)...(18): Xaa = Any Amino Acid
CCEYCCNXPACXTGXXCY

SEQ ID NO: 1424 - protein, 18 aa, Artificial Sequence
  Synthetically generated peptide
  VARIANT (1)...(18): Xaa = Any Amino Acid
CCEYCCNXPACXTGXCXY

SEQ ID NO: 1425 - protein, 17 aa, Artificial Sequence
  Synthetically generated peptide
  VARIANT (1)...(17): Xaa = Any Amino Acid
CCEYCCNXPACXTGCXY

SEQ ID NO: 1426 - protein, 18 aa, Artificial Sequence
  Synthetically generated peptide
  VARIANT (1)...(18): Xaa = Any Amino Acid
CCEYCCNXPACXTGCXXY

SEQ ID NO: 1427 - protein, 16 aa, Artificial Sequence
  Synthetically generated peptide
  VARIANT (1)...(16): Xaa = Any Amino Acid
  VARIANT (1)...(16): Xaa = Any Amino Acid
CCEYCCNXPACTXGCY

SEQ ID NO: 1428 - protein, 17 aa, Artificial Sequence
  Synthetically generated peptide
  VARIANT (1)...(17): Xaa = Any Amino Acid
CCEYCCNXPACTXXGCY

SEQ ID NO: 1429 - protein, 18 aa, Artificial Sequence
  Synthetically generated peptide
  VARIANT (1)...(18): Xaa = Any Amino Acid
CCEYCCNXPACTXXXGCY

SEQ ID NO: 1430 - protein, 18 aa, Artificial Sequence
  Synthetically generated peptide
  VARIANT (1)...(18): Xaa = Any Amino Acid
CCEYCCNXPACTXXGXCY

SEQ ID NO: 1431 - protein, 18 aa, Artificial Sequence
  Synthetically generated peptide
  VARIANT (1)...(18): Xaa = Any Amino Acid
CCEYCCNXPACTXXGCXY

SEQ ID NO: 1432 - protein, 17 aa, Artificial Sequence
  Synthetically generated peptide
  VARIANT (1)...(17): Xaa = Any Amino Acid
CCEYCCNXPACTXGXCY

SEQ ID NO: 1433 - protein, 18 aa, Artificial Sequence
  Synthetically generated peptide
  VARIANT (1)...(18): Xaa = Any Amino Acid
CCEYCCNXPACTXGXXCY

SEQ ID NO: 1434 - protein, 18 aa, Artificial Sequence
  Synthetically generated peptide
  VARIANT (1)...(18): Xaa = Any Amino Acid
CCEYCCNXPACTXGXCXY

SEQ ID NO: 1435 - protein, 17 aa, Artificial Sequence
  Synthetically generated peptide
  VARIANT (1)...(17): Xaa = Any Amino Acid
CCEYCCNXPACTXGCXY

SEQ ID NO: 1436 - protein, 18 aa, Artificial Sequence
  Synthetically generated peptide
  VARIANT (1)...(18): Xaa = Any Amino Acid
CCEYCCNXPACTXGCXXY

SEQ ID NO: 1437 - protein, 16 aa, Artificial Sequence
  Synthetically generated peptide
  VARIANT (1)...(16): Xaa = Any Amino Acid
  VARIANT (1)...(16): Xaa = Any Amino Acid
CCEYCCNXPACTGXCY

SEQ ID NO: 1438 - protein, 17 aa, Artificial Sequence
  Synthetically generated peptide
  VARIANT (1)...(17): Xaa = Any Amino Acid
CCEYCCNXPACTGXXCY

SEQ ID NO: 1439 - protein, 18 aa, Artificial Sequence
  Synthetically generated peptide
  VARIANT (1)...(18): Xaa = Any Amino Acid
CCEYCCNXPACTGXXXCY

SEQ ID NO: 1440 - protein, 18 aa, Artificial Sequence
  Synthetically generated peptide
  VARIANT (1)...(18): Xaa = Any Amino Acid
CCEYCCNXPACTGXXCXY

SEQ ID NO: 1441 - protein, 17 aa, Artificial Sequence
  Synthetically generated peptide
  VARIANT (1)...(17): Xaa = Any Amino Acid
CCEYCCNXPACTGXCXY

SEQ ID NO: 1442 - protein, 18 aa, Artificial Sequence
  Synthetically generated peptide
  VARIANT (1)...(18): Xaa = Any Amino Acid
CCEYCCNXPACTGXCXXY

SEQ ID NO: 1443 - protein, 16 aa, Artificial Sequence
  Synthetically generated peptide
  VARIANT (1)...(16): Xaa = Any Amino Acid
  VARIANT (1)...(16): Xaa = Any Amino Acid
CCEYCCNXPACTGCXY

SEQ ID NO: 1444 - protein, 17 aa, Artificial Sequence
  Synthetically generated peptide
  VARIANT (1)...(17): Xaa = Any Amino Acid
CCEYCCNXPACTGCXXY

SEQ ID NO: 1445 - protein, 18 aa, Artificial Sequence
  Synthetically generated peptide
  VARIANT (1)...(18): Xaa = Any Amino Acid
CCEYCCNXPACTGCXXXY

SEQ ID NO: 1446 - protein, 15 aa, Artificial Sequence
  Synthetically generated peptide
  VARIANT (1)...(15): Xaa = Any Amino Acid
  VARIANT (1)...(15): Xaa = Any Amino Acid
CCEYCCNPXACTGCY

SEQ ID NO: 1447 - protein, 16 aa, Artificial Sequence
  Synthetically generated peptide
  VARIANT (1)...(16): Xaa = Any Amino Acid
  VARIANT (1)...(16): Xaa = Any Amino Acid
CCEYCCNPXXACTGCY

SEQ ID NO: 1448 - protein, 17 aa, Artificial Sequence
  Synthetically generated peptide
  VARIANT (1)...(17): Xaa = Any Amino Acid
CCEYCCNPXXXACTGCY

SEQ ID NO: 1449 - protein, 18 aa, Artificial Sequence
  Synthetically generated peptide
  VARIANT (1)...(18): Xaa = Any Amino Acid
CCEYCCNPXXXXACTGCY

SEQ ID NO: 1450 - protein, 18 aa, Artificial Sequence
  Synthetically generated peptide
  VARIANT (1)...(18): Xaa = Any Amino Acid
CCEYCCNPXXXAXCTGCY

SEQ ID NO: 1451 - protein, 18 aa, Artificial Sequence
  Synthetically generated peptide
  VARIANT (1)...(18): Xaa = Any Amino Acid
CCEYCCNPXXXACXTGCY

SEQ ID NO: 1452 - protein, 18 aa, Artificial Sequence
  Synthetically generated peptide
  VARIANT (1)...(18): Xaa = Any Amino Acid
CCEYCCNPXXXACTXGCY

SEQ ID NO: 1453 - protein, 18 aa, Artificial Sequence
  Synthetically generated peptide
  VARIANT (1)...(18): Xaa = Any Amino Acid
CCEYCCNPXXXACTGXCY

SEQ ID NO: 1454 - protein, 18 aa, Artificial Sequence
  Synthetically generated peptide
  VARIANT (1)...(18): Xaa = Any Amino Acid
CCEYCCNPXXXACTGCXY

SEQ ID NO: 1455 - protein, 17 aa, Artificial Sequence
  Synthetically generated peptide
  VARIANT (1)...(17): Xaa = Any Amino Acid
CCEYCCNPXXAXCTGCY

SEQ ID NO: 1456 - protein, 18 aa, Artificial Sequence
  Synthetically generated peptide
  VARIANT (1)...(18): Xaa = Any Amino Acid
CCEYCCNPXXAXXCTGCY

SEQ ID NO: 1457 - protein, 18 aa, Artificial Sequence
  Synthetically generated peptide
  VARIANT (1)...(18): Xaa = Any Amino Acid
CCEYCCNPXXAXCXTGCY

SEQ ID NO: 1458 - protein, 18 aa, Artificial Sequence
  Synthetically generated peptide
  VARIANT (1)...(18): Xaa = Any Amino Acid
CCEYCCNPXXAXCTXGCY

SEQ ID NO: 1459 - protein, 18 aa, Artificial Sequence
  Synthetically generated peptide
  VARIANT (1)...(18): Xaa = Any Amino Acid
CCEYCCNPXXAXCTGXCY

SEQ ID NO: 1460 - protein, 18 aa, Artificial Sequence
  Synthetically generated peptide
  VARIANT (1)...(18): Xaa = Any Amino Acid
CCEYCCNPXXAXCTGCXY

SEQ ID NO: 1461 - protein, 17 aa, Artificial Sequence
  Synthetically generated peptide
  VARIANT (1)...(17): Xaa = Any Amino Acid
CCEYCCNPXXACXTGCY

SEQ ID NO: 1462 - protein, 18 aa, Artificial Sequence
  Synthetically generated peptide
  VARIANT (1)...(18): Xaa = Any Amino Acid
CCEYCCNPXXACXXTGCY

SEQ ID NO: 1463 - protein, 18 aa, Artificial Sequence
  Synthetically generated peptide
  VARIANT (1)...(18): Xaa = Any Amino Acid
CCEYCCNPXXACXTXGCY

SEQ ID NO: 1464 - protein, 18 aa, Artificial Sequence
  Synthetically generated peptide
  VARIANT (1)...(18): Xaa = Any Amino Acid
CCEYCCNPXXACXTGXCY

SEQ ID NO: 1465 - protein, 18 aa, Artificial Sequence
  Synthetically generated peptide
  VARIANT (1)...(18): Xaa = Any Amino Acid
CCEYCCNPXXACXTGCXY

SEQ ID NO: 1466 - protein, 17 aa, Artificial Sequence
  Synthetically generated peptide
  VARIANT (1)...(17): Xaa = Any Amino Acid
CCEYCCNPXXACTXGCY

SEQ ID NO: 1467 - protein, 18 aa, Artificial Sequence
  Synthetically generated peptide
  VARIANT (1)...(18): Xaa = Any Amino Acid
CCEYCCNPXXACTXXGCY

SEQ ID NO: 1468 - protein, 18 aa, Artificial Sequence
  Synthetically generated peptide
  VARIANT (1)...(18): Xaa = Any Amino Acid
CCEYCCNPXXACTXGXCY

SEQ ID NO: 1469 - protein, 18 aa, Artificial Sequence
  Synthetically generated peptide
  VARIANT (1)...(18): Xaa = Any Amino Acid
CCEYCCNPXXACTXGCXY

SEQ ID NO: 1470 - protein, 17 aa, Artificial Sequence
  Synthetically generated peptide
  VARIANT (1)...(17): Xaa = Any Amino Acid
CCEYCCNPXXACTGXCY

SEQ ID NO: 1471 - protein, 18 aa, Artificial Sequence
  Synthetically generated peptide
  VARIANT (1)...(18): Xaa = Any Amino Acid
CCEYCCNPXXACTGXXCY

SEQ ID NO: 1472 - protein, 18 aa, Artificial Sequence
  Synthetically generated peptide
  VARIANT (1)...(18): Xaa = Any Amino Acid
CCEYCCNPXXACTGXCXY

SEQ ID NO: 1473 - protein, 17 aa, Artificial Sequence
  Synthetically generated peptide
  VARIANT (1)...(17): Xaa = Any Amino Acid
CCEYCCNPXXACTGCXY

SEQ ID NO: 1474 - protein, 18 aa, Artificial Sequence
  Synthetically generated peptide
  VARIANT (1)...(18): Xaa = Any Amino Acid
CCEYCCNPXXACTGCXXY

SEQ ID NO: 1475 - protein, 16 aa, Artificial Sequence
  Synthetically generated peptide
  VARIANT (1)...(16): Xaa = Any Amino Acid
  VARIANT (1)...(16): Xaa = Any Amino Acid
CCEYCCNPXAXCTGCY

SEQ ID NO: 1476 - protein, 17 aa, Artificial Sequence
  Synthetically generated peptide
  VARIANT (1)...(17): Xaa = Any Amino Acid
CCEYCCNPXAXXCTGCY

SEQ ID NO: 1477 - protein, 18 aa, Artificial Sequence
  Synthetically generated peptide
  VARIANT (1)...(18): Xaa = Any Amino Acid
CCEYCCNPXAXXXCTGCY

SEQ ID NO: 1478 - protein, 18 aa, Artificial Sequence
  Synthetically generated peptide
  VARIANT (1)...(18): Xaa = Any Amino Acid
CCEYCCNPXAXXCXTGCY

SEQ ID NO: 1479 - protein, 18 aa, Artificial Sequence
  Synthetically generated peptide
  VARIANT (1)...(18): Xaa = Any Amino Acid
CCEYCCNPXAXXCTXGCY

SEQ ID NO: 1480 - protein, 18 aa, Artificial Sequence
  Synthetically generated peptide
  VARIANT (1)...(18): Xaa = Any Amino Acid
CCEYCCNPXAXXCTGXCY

SEQ ID NO: 1481 - protein, 18 aa, Artificial Sequence
  Synthetically generated peptide
  VARIANT (1)...(18): Xaa = Any Amino Acid
CCEYCCNPXAXXCTGCXY

SEQ ID NO: 1482 - protein, 17 aa, Artificial Sequence
  Synthetically generated peptide
  VARIANT (1)...(17): Xaa = Any Amino Acid
CCEYCCNPXAXCXTGCY

SEQ ID NO: 1483 - protein, 18 aa, Artificial Sequence
  Synthetically generated peptide
  VARIANT (1)...(18): Xaa = Any Amino Acid
CCEYCCNPXAXCXXTGCY

SEQ ID NO: 1484 - protein, 18 aa, Artificial Sequence
  Synthetically generated peptide
  VARIANT (1)...(18): Xaa = Any Amino Acid
CCEYCCNPXAXCXTXGCY

SEQ ID NO: 1485 - protein, 18 aa, Artificial Sequence
  Synthetically generated peptide
  VARIANT (1)...(18): Xaa = Any Amino Acid
CCEYCCNPXAXCXTGXCY

SEQ ID NO: 1486 - protein, 18 aa, Artificial Sequence
  Synthetically generated peptide
  VARIANT (1)...(18): Xaa = Any Amino Acid
CCEYCCNPXAXCXTGCXY

SEQ ID NO: 1487 - protein, 17 aa, Artificial Sequence
  Synthetically generated peptide
  VARIANT (1)...(17): Xaa = Any Amino Acid
CCEYCCNPXAXCTXGCY

SEQ ID NO: 1488 - protein, 18 aa, Artificial Sequence
  Synthetically generated peptide
  VARIANT (1)...(18): Xaa = Any Amino Acid
CCEYCCNPXAXCTXXGCY

SEQ ID NO: 1489 - protein, 18 aa, Artificial Sequence
  Synthetically generated peptide
  VARIANT (1)...(18): Xaa = Any Amino Acid
CCEYCCNPXAXCTXGXCY

SEQ ID NO: 1490 - protein, 18 aa, Artificial Sequence
  Synthetically generated peptide
  VARIANT (1)...(18): Xaa = Any Amino Acid
CCEYCCNPXAXCTXGCXY

SEQ ID NO: 1491 - protein, 17 aa, Artificial Sequence
  Synthetically generated peptide
  VARIANT (1)...(17): Xaa = Any Amino Acid
CCEYCCNPXAXCTGXCY

SEQ ID NO: 1492 - protein, 18 aa, Artificial Sequence
  Synthetically generated peptide
  VARIANT (1)...(18): Xaa = Any Amino Acid
CCEYCCNPXAXCTGXXCY

SEQ ID NO: 1493 - protein, 18 aa, Artificial Sequence
  Synthetically generated peptide
  VARIANT (1)...(18): Xaa = Any Amino Acid
CCEYCCNPXAXCTGXCXY

SEQ ID NO: 1494 - protein, 17 aa, Artificial Sequence
  Synthetically generated peptide
  VARIANT (1)...(17): Xaa = Any Amino Acid
CCEYCCNPXAXCTGCXY

SEQ ID NO: 1495 - protein, 18 aa, Artificial Sequence
  Synthetically generated peptide
  VARIANT (1)...(18): Xaa = Any Amino Acid
CCEYCCNPXAXCTGCXXY

SEQ ID NO: 1496 - protein, 16 aa, Artificial Sequence
  Synthetically generated peptide
  VARIANT (1)...(16): Xaa = Any Amino Acid
  VARIANT (1)...(16): Xaa = Any Amino Acid
CCEYCCNPXACXTGCY

SEQ ID NO: 1497 - protein, 17 aa, Artificial Sequence
  Synthetically generated peptide
  VARIANT (1)...(17): Xaa = Any Amino Acid
CCEYCCNPXACXXTGCY

SEQ ID NO: 1498 - protein, 18 aa, Artificial Sequence
  Synthetically generated peptide
  VARIANT (1)...(18): Xaa = Any Amino Acid
CCEYCCNPXACXXXTGCY

SEQ ID NO: 1499 - protein, 18 aa, Artificial Sequence
  Synthetically generated peptide
  VARIANT (1)...(18): Xaa = Any Amino Acid
CCEYCCNPXACXXTXGCY

SEQ ID NO: 1500 - protein, 18 aa, Artificial Sequence
  Synthetically generated peptide
  VARIANT (1)...(18): Xaa = Any Amino Acid
CCEYCCNPXACXXTGXCY

SEQ ID NO: 1501 - protein, 18 aa, Artificial Sequence
  Synthetically generated peptide
  VARIANT (1)...(18): Xaa = Any Amino Acid
CCEYCCNPXACXXTGCXY

SEQ ID NO: 1502 - protein, 17 aa, Artificial Sequence
  Synthetically generated peptide
  VARIANT (1)...(17): Xaa = Any Amino Acid
CCEYCCNPXACXTXGCY

SEQ ID NO: 1503 - protein, 18 aa, Artificial Sequence
  Synthetically generated peptide
  VARIANT (1)...(18): Xaa = Any Amino Acid
CCEYCCNPXACXTXXGCY

SEQ ID NO: 1504 - protein, 18 aa, Artificial Sequence
  Synthetically generated peptide
  VARIANT (1)...(18): Xaa = Any Amino Acid
CCEYCCNPXACXTXGXCY

SEQ ID NO: 1505 - protein, 18 aa, Artificial Sequence
  Synthetically generated peptide
  VARIANT (1)...(18): Xaa = Any Amino Acid
CCEYCCNPXACXTXGCXY

SEQ ID NO: 1506 - protein, 17 aa, Artificial Sequence
  Synthetically generated peptide
  VARIANT (1)...(17): Xaa = Any Amino Acid
CCEYCCNPXACXTGXCY

SEQ ID NO: 1507 - protein, 18 aa, Artificial Sequence
  Synthetically generated peptide
  VARIANT (1)...(18): Xaa = Any Amino Acid
CCEYCCNPXACXTGXXCY

SEQ ID NO: 1508 - protein, 18 aa, Artificial Sequence
  Synthetically generated peptide
  VARIANT (1)...(18): Xaa = Any Amino Acid
CCEYCCNPXACXTGXCXY

SEQ ID NO: 1509 - protein, 17 aa, Artificial Sequence
  Synthetically generated peptide
  VARIANT (1)...(17): Xaa = Any Amino Acid
CCEYCCNPXACXTGCXY

SEQ ID NO: 1510 - protein, 18 aa, Artificial Sequence
  Synthetically generated peptide
  VARIANT (1)...(18): Xaa = Any Amino Acid
CCEYCCNPXACXTGCXXY

SEQ ID NO: 1511 - protein, 16 aa, Artificial Sequence
  Synthetically generated peptide
  VARIANT (1)...(16): Xaa = Any Amino Acid
  VARIANT (1)...(16): Xaa = Any Amino Acid
CCEYCCNPXACTXGCY

SEQ ID NO: 1512 - protein, 17 aa, Artificial Sequence
  Synthetically generated peptide
  VARIANT (1)...(17): Xaa = Any Amino Acid
CCEYCCNPXACTXXGCY

SEQ ID NO: 1513 - protein, 18 aa, Artificial Sequence
  Synthetically generated peptide
  VARIANT (1)...(18): Xaa = Any Amino Acid
CCEYCCNPXACTXXXGCY

SEQ ID NO: 1514 - protein, 18 aa, Artificial Sequence
  Synthetically generated peptide
  VARIANT (1)...(18): Xaa = Any Amino Acid
CCEYCCNPXACTXXGXCY

SEQ ID NO: 1515 - protein, 18 aa, Artificial Sequence
  Synthetically generated peptide
  VARIANT (1)...(18): Xaa = Any Amino Acid
CCEYCCNPXACTXXGCXY

SEQ ID NO: 1516 - protein, 17 aa, Artificial Sequence
  Synthetically generated peptide
  VARIANT (1)...(17): Xaa = Any Amino Acid
CCEYCCNPXACTXGXCY

SEQ ID NO: 1517 - protein, 18 aa, Artificial Sequence
  Synthetically generated peptide
  VARIANT (1)...(18): Xaa = Any Amino Acid
CCEYCCNPXACTXGXXCY

SEQ ID NO: 1518 - protein, 18 aa, Artificial Sequence
  Synthetically generated peptide
  VARIANT (1)...(18): Xaa = Any Amino Acid
CCEYCCNPXACTXGXCXY

SEQ ID NO: 1519 - protein, 17 aa, Artificial Sequence
  Synthetically generated peptide
  VARIANT (1)...(17): Xaa = Any Amino Acid
CCEYCCNPXACTXGCXY

SEQ ID NO: 1520 - protein, 18 aa, Artificial Sequence
  Synthetically generated peptide
  VARIANT (1)...(18): Xaa = Any Amino Acid
CCEYCCNPXACTXGCXXY

SEQ ID NO: 1521 - protein, 16 aa, Artificial Sequence
  Synthetically generated peptide
  VARIANT (1)...(16): Xaa = Any Amino Acid
  VARIANT (1)...(16): Xaa = Any Amino Acid
CCEYCCNPXACTGXCY

SEQ ID NO: 1522 - protein, 17 aa, Artificial Sequence
  Synthetically generated peptide
  VARIANT (1)...(17): Xaa = Any Amino Acid
CCEYCCNPXACTGXXCY

SEQ ID NO: 1523 - protein, 18 aa, Artificial Sequence
  Synthetically generated peptide
  VARIANT (1)...(18): Xaa = Any Amino Acid
CCEYCCNPXACTGXXXCY

SEQ ID NO: 1524 - protein, 18 aa, Artificial Sequence
  Synthetically generated peptide
  VARIANT (1)...(18): Xaa = Any Amino Acid
CCEYCCNPXACTGXXCXY

SEQ ID NO: 1525 - protein, 17 aa, Artificial Sequence
  Synthetically generated peptide
  VARIANT (1)...(17): Xaa = Any Amino Acid
CCEYCCNPXACTGXCXY

SEQ ID NO: 1526 - protein, 18 aa, Artificial Sequence
  Synthetically generated peptide
  VARIANT (1)...(18): Xaa = Any Amino Acid
CCEYCCNPXACTGXCXXY

SEQ ID NO: 1527 - protein, 16 aa, Artificial Sequence
  Synthetically generated peptide
  VARIANT (1)...(16): Xaa = Any Amino Acid
  VARIANT (1)...(16): Xaa = Any Amino Acid
CCEYCCNPXACTGCXY

SEQ ID NO: 1528 - protein, 17 aa, Artificial Sequence
  Synthetically generated peptide
  VARIANT (1)...(17): Xaa = Any Amino Acid
CCEYCCNPXACTGCXXY

SEQ ID NO: 1529 - protein, 18 aa, Artificial Sequence
  Synthetically generated peptide
  VARIANT (1)...(18): Xaa = Any Amino Acid
CCEYCCNPXACTGCXXXY

SEQ ID NO: 1530 - protein, 15 aa, Artificial Sequence
  Synthetically generated peptide
  VARIANT (1)...(15): Xaa = Any Amino Acid
  VARIANT (1)...(15): Xaa = Any Amino Acid
CCEYCCNPAXCTGCY

SEQ ID NO: 1531 - protein, 16 aa, Artificial Sequence
  Synthetically generated peptide
  VARIANT (1)...(16): Xaa = Any Amino Acid
  VARIANT (1)...(16): Xaa = Any Amino Acid
CCEYCCNPAXXCTGCY

SEQ ID NO: 1532 - protein, 17 aa, Artificial Sequence
  Synthetically generated peptide
  VARIANT (1)...(17): Xaa = Any Amino Acid
CCEYCCNPAXXXCTGCY

SEQ ID NO: 1533 - protein, 18 aa, Artificial Sequence
  Synthetically generated peptide
  VARIANT (1)...(18): Xaa = Any Amino Acid
CCEYCCNPAXXXXCTGCY

SEQ ID NO: 1534 - protein, 18 aa, Artificial Sequence
  Synthetically generated peptide
  VARIANT (1)...(18): Xaa = Any Amino Acid
CCEYCCNPAXXXCXTGCY

SEQ ID NO: 1535 - protein, 18 aa, Artificial Sequence
  Synthetically generated peptide
  VARIANT (1)...(18): Xaa = Any Amino Acid
CCEYCCNPAXXXCTXGCY

SEQ ID NO: 1536 - protein, 18 aa, Artificial Sequence
  Synthetically generated peptide
  VARIANT (1)...(18): Xaa = Any Amino Acid
CCEYCCNPAXXXCTGXCY

SEQ ID NO: 1537 - protein, 18 aa, Artificial Sequence
  Synthetically generated peptide
  VARIANT (1)...(18): Xaa = Any Amino Acid
CCEYCCNPAXXXCTGCXY

SEQ ID NO: 1538 - protein, 17 aa, Artificial Sequence
  Synthetically generated peptide
  VARIANT (1)...(17): Xaa = Any Amino Acid
CCEYCCNPAXXCXTGCY

SEQ ID NO: 1539 - protein, 18 aa, Artificial Sequence
  Synthetically generated peptide
  VARIANT (1)...(18): Xaa = Any Amino Acid
CCEYCCNPAXXCXXTGCY

SEQ ID NO: 1540 - protein, 18 aa, Artificial Sequence
  Synthetically generated peptide
  VARIANT (1)...(18): Xaa = Any Amino Acid
CCEYCCNPAXXCXTXGCY

SEQ ID NO: 1541 - protein, 18 aa, Artificial Sequence
  Synthetically generated peptide
  VARIANT (1)...(18): Xaa = Any Amino Acid
CCEYCCNPAXXCXTGXCY

SEQ ID NO: 1542 - protein, 18 aa, Artificial Sequence
  Synthetically generated peptide
  VARIANT (1)...(18): Xaa = Any Amino Acid
CCEYCCNPAXXCXTGCXY

SEQ ID NO: 1543 - protein, 17 aa, Artificial Sequence
  Synthetically generated peptide
  VARIANT (1)...(17): Xaa = Any Amino Acid
CCEYCCNPAXXCTXGCY

SEQ ID NO: 1544 - protein, 18 aa, Artificial Sequence
  Synthetically generated peptide
  VARIANT (1)...(18): Xaa = Any Amino Acid
CCEYCCNPAXXCTXXGCY

SEQ ID NO: 1545 - protein, 18 aa, Artificial Sequence
  Synthetically generated peptide
  VARIANT (1)...(18): Xaa = Any Amino Acid
CCEYCCNPAXXCTXGXCY

SEQ ID NO: 1546 - protein, 18 aa, Artificial Sequence
  Synthetically generated peptide
  VARIANT (1)...(18): Xaa = Any Amino Acid
CCEYCCNPAXXCTXGCXY

SEQ ID NO: 1547 - protein, 17 aa, Artificial Sequence
  Synthetically generated peptide
  VARIANT (1)...(17): Xaa = Any Amino Acid
CCEYCCNPAXXCTGXCY

SEQ ID NO: 1548 - protein, 18 aa, Artificial Sequence
  Synthetically generated peptide
  VARIANT (1)...(18): Xaa = Any Amino Acid
CCEYCCNPAXXCTGXXCY

SEQ ID NO: 1549 - protein, 18 aa, Artificial Sequence
  Synthetically generated peptide
  VARIANT (1)...(18): Xaa = Any Amino Acid
CCEYCCNPAXXCTGXCXY

SEQ ID NO: 1550 - protein, 17 aa, Artificial Sequence
  Synthetically generated peptide
  VARIANT (1)...(17): Xaa = Any Amino Acid
CCEYCCNPAXXCTGCXY

SEQ ID NO: 1551 - protein, 18 aa, Artificial Sequence
  Synthetically generated peptide
  VARIANT (1)...(18): Xaa = Any Amino Acid
CCEYCCNPAXXCTGCXXY

SEQ ID NO: 1552 - protein, 16 aa, Artificial Sequence
  Synthetically generated peptide
  VARIANT (1)...(16): Xaa = Any Amino Acid
  VARIANT (1)...(16): Xaa = Any Amino Acid
CCEYCCNPAXCXTGCY

SEQ ID NO: 1553 - protein, 17 aa, Artificial Sequence
  Synthetically generated peptide
  VARIANT (1)...(17): Xaa = Any Amino Acid
CCEYCCNPAXCXXTGCY

SEQ ID NO: 1554 - protein, 18 aa, Artificial Sequence
  Synthetically generated peptide
  VARIANT (1)...(18): Xaa = Any Amino Acid
CCEYCCNPAXCXXXTGCY

SEQ ID NO: 1555 - protein, 18 aa, Artificial Sequence
  Synthetically generated peptide
  VARIANT (1)...(18): Xaa = Any Amino Acid
CCEYCCNPAXCXXTXGCY

SEQ ID NO: 1556 - protein, 18 aa, Artificial Sequence
  Synthetically generated peptide
  VARIANT (1)...(18): Xaa = Any Amino Acid
CCEYCCNPAXCXXTGXCY

SEQ ID NO: 1557 - protein, 18 aa, Artificial Sequence
  Synthetically generated peptide
  VARIANT (1)...(18): Xaa = Any Amino Acid
CCEYCCNPAXCXXTGCXY

SEQ ID NO: 1558 - protein, 17 aa, Artificial Sequence
  Synthetically generated peptide
  VARIANT (1)...(17): Xaa = Any Amino Acid
CCEYCCNPAXCXTXGCY

SEQ ID NO: 1559 - protein, 18 aa, Artificial Sequence
  Synthetically generated peptide
  VARIANT (1)...(18): Xaa = Any Amino Acid
CCEYCCNPAXCXTXXGCY

SEQ ID NO: 1560 - protein, 18 aa, Artificial Sequence
  Synthetically generated peptide
  VARIANT (1)...(18): Xaa = Any Amino Acid
CCEYCCNPAXCXTXGXCY

SEQ ID NO: 1561 - protein, 18 aa, Artificial Sequence
  Synthetically generated peptide
  VARIANT (1)...(18): Xaa = Any Amino Acid
CCEYCCNPAXCXTXGCXY

SEQ ID NO: 1562 - protein, 17 aa, Artificial Sequence
  Synthetically generated peptide
  VARIANT (1)...(17): Xaa = Any Amino Acid
CCEYCCNPAXCXTGXCY

SEQ ID NO: 1563 - protein, 18 aa, Artificial Sequence
  Synthetically generated peptide
  VARIANT (1)...(18): Xaa = Any Amino Acid
CCEYCCNPAXCXTGXXCY

SEQ ID NO: 1564 - protein, 18 aa, Artificial Sequence
  Synthetically generated peptide
  VARIANT (1)...(18): Xaa = Any Amino Acid
CCEYCCNPAXCXTGXCXY

SEQ ID NO: 1565 - protein, 17 aa, Artificial Sequence
  Synthetically generated peptide
  VARIANT (1)...(17): Xaa = Any Amino Acid
CCEYCCNPAXCXTGCXY

SEQ ID NO: 1566 - protein, 18 aa, Artificial Sequence
  Synthetically generated peptide
  VARIANT (1)...(18): Xaa = Any Amino Acid
CCEYCCNPAXCXTGCXXY

SEQ ID NO: 1567 - protein, 16 aa, Artificial Sequence
  Synthetically generated peptide
  VARIANT (1)...(16): Xaa = Any Amino Acid
  VARIANT (1)...(16): Xaa = Any Amino Acid
CCEYCCNPAXCTXGCY

SEQ ID NO: 1568 - protein, 17 aa, Artificial Sequence
  Synthetically generated peptide
  VARIANT (1)...(17): Xaa = Any Amino Acid
CCEYCCNPAXCTXXGCY

SEQ ID NO: 1569 - protein, 18 aa, Artificial Sequence
  Synthetically generated peptide
  VARIANT (1)...(18): Xaa = Any Amino Acid
CCEYCCNPAXCTXXXGCY

SEQ ID NO: 1570 - protein, 18 aa, Artificial Sequence
  Synthetically generated peptide
  VARIANT (1)...(18): Xaa = Any Amino Acid
CCEYCCNPAXCTXXGXCY

SEQ ID NO: 1571 - protein, 18 aa, Artificial Sequence
  Synthetically generated peptide
  VARIANT (1)...(18): Xaa = Any Amino Acid
CCEYCCNPAXCTXXGCXY

SEQ ID NO: 1572 - protein, 17 aa, Artificial Sequence
  Synthetically generated peptide
  VARIANT (1)...(17): Xaa = Any Amino Acid
CCEYCCNPAXCTXGXCY

SEQ ID NO: 1573 - protein, 18 aa, Artificial Sequence
  Synthetically generated peptide
  VARIANT (1)...(18): Xaa = Any Amino Acid
CCEYCCNPAXCTXGXXCY

SEQ ID NO: 1574 - protein, 18 aa, Artificial Sequence
  Synthetically generated peptide
  VARIANT (1)...(18): Xaa = Any Amino Acid
CCEYCCNPAXCTXGXCXY

SEQ ID NO: 1575 - protein, 17 aa, Artificial Sequence
  Synthetically generated peptide
  VARIANT (1)...(17): Xaa = Any Amino Acid
CCEYCCNPAXCTXGCXY

SEQ ID NO: 1576 - protein, 18 aa, Artificial Sequence
  Synthetically generated peptide
  VARIANT (1)...(18): Xaa = Any Amino Acid
CCEYCCNPAXCTXGCXXY

SEQ ID NO: 1577 - protein, 16 aa, Artificial Sequence
  Synthetically generated peptide
  VARIANT (1)...(16): Xaa = Any Amino Acid
  VARIANT (1)...(16): Xaa = Any Amino Acid
CCEYCCNPAXCTGXCY

SEQ ID NO: 1578 - protein, 17 aa, Artificial Sequence
  Synthetically generated peptide
  VARIANT (1)...(17): Xaa = Any Amino Acid
CCEYCCNPAXCTGXXCY

SEQ ID NO: 1579 - protein, 18 aa, Artificial Sequence
  Synthetically generated peptide
  VARIANT (1)...(18): Xaa = Any Amino Acid
CCEYCCNPAXCTGXXXCY

SEQ ID NO: 1580 - protein, 18 aa, Artificial Sequence
  Synthetically generated peptide
  VARIANT (1)...(18): Xaa = Any Amino Acid
CCEYCCNPAXCTGXXCXY

SEQ ID NO: 1581 - protein, 17 aa, Artificial Sequence
  Synthetically generated peptide
  VARIANT (1)...(17): Xaa = Any Amino Acid
CCEYCCNPAXCTGXCXY

SEQ ID NO: 1582 - protein, 18 aa, Artificial Sequence
  Synthetically generated peptide
  VARIANT (1)...(18): Xaa = Any Amino Acid
CCEYCCNPAXCTGXCXXY

SEQ ID NO: 1583 - protein, 16 aa, Artificial Sequence
  Synthetically generated peptide
  VARIANT (1)...(16): Xaa = Any Amino Acid
  VARIANT (1)...(16): Xaa = Any Amino Acid
CCEYCCNPAXCTGCXY

SEQ ID NO: 1584 - protein, 17 aa, Artificial Sequence
  Synthetically generated peptide
  VARIANT (1)...(17): Xaa = Any Amino Acid
CCEYCCNPAXCTGCXXY

SEQ ID NO: 1585 - protein, 18 aa, Artificial Sequence
  Synthetically generated peptide
  VARIANT (1)...(18): Xaa = Any Amino Acid
CCEYCCNPAXCTGCXXXY

SEQ ID NO: 1586 - protein, 15 aa, Artificial Sequence
  Synthetically generated peptide
  VARIANT (1)...(15): Xaa = Any Amino Acid
  VARIANT (1)...(15): Xaa = Any Amino Acid
CCEYCCNPACXTGCY

SEQ ID NO: 1587 - protein, 16 aa, Artificial Sequence
  Synthetically generated peptide
  VARIANT (1)...(16): Xaa = Any Amino Acid
  VARIANT (1)...(16): Xaa = Any Amino Acid
CCEYCCNPACXXTGCY

SEQ ID NO: 1588 - protein, 17 aa, Artificial Sequence
  Synthetically generated peptide
  VARIANT (1)...(17): Xaa = Any Amino Acid
CCEYCCNPACXXXTGCY

SEQ ID NO: 1589 - protein, 18 aa, Artificial Sequence
  Synthetically generated peptide
  VARIANT (1)...(18): Xaa = Any Amino Acid
CCEYCCNPACXXXXTGCY

SEQ ID NO: 1590 - protein, 18 aa, Artificial Sequence
  Synthetically generated peptide
  VARIANT (1)...(18): Xaa = Any Amino Acid
CCEYCCNPACXXXTXGCY

SEQ ID NO: 1591 - protein, 18 aa, Artificial Sequence
  Synthetically generated peptide
  VARIANT (1)...(18): Xaa = Any Amino Acid
CCEYCCNPACXXXTGXCY

SEQ ID NO: 1592 - protein, 18 aa, Artificial Sequence
  Synthetically generated peptide
  VARIANT (1)...(18): Xaa = Any Amino Acid
CCEYCCNPACXXXTGCXY

SEQ ID NO: 1593 - protein, 17 aa, Artificial Sequence
  Synthetically generated peptide
  VARIANT (1)...(17): Xaa = Any Amino Acid
CCEYCCNPACXXTXGCY

SEQ ID NO: 1594 - protein, 18 aa, Artificial Sequence
  Synthetically generated peptide
  VARIANT (1)...(18): Xaa = Any Amino Acid
CCEYCCNPACXXTXXGCY

SEQ ID NO: 1595 - protein, 18 aa, Artificial Sequence
  Synthetically generated peptide
  VARIANT (1)...(18): Xaa = Any Amino Acid
CCEYCCNPACXXTXGXCY

SEQ ID NO: 1596 - protein, 18 aa, Artificial Sequence
  Synthetically generated peptide
  VARIANT (1)...(18): Xaa = Any Amino Acid
CCEYCCNPACXXTXGCXY

SEQ ID NO: 1597 - protein, 17 aa, Artificial Sequence
  Synthetically generated peptide
  VARIANT (1)...(17): Xaa = Any Amino Acid
CCEYCCNPACXXTGXCY

SEQ ID NO: 1598 - protein, 18 aa, Artificial Sequence
  Synthetically generated peptide
  VARIANT (1)...(18): Xaa = Any Amino Acid
CCEYCCNPACXXTGXXCY

SEQ ID NO: 1599 - protein, 18 aa, Artificial Sequence
  Synthetically generated peptide
  VARIANT (1)...(18): Xaa = Any Amino Acid
CCEYCCNPACXXTGXCXY

SEQ ID NO: 1600 - protein, 17 aa, Artificial Sequence
  Synthetically generated peptide
  VARIANT (1)...(17): Xaa = Any Amino Acid
CCEYCCNPACXXTGCXY

SEQ ID NO: 1601 - protein, 18 aa, Artificial Sequence
  Synthetically generated peptide
  VARIANT (1)...(18): Xaa = Any Amino Acid
CCEYCCNPACXXTGCXXY

SEQ ID NO: 1602 - protein, 16 aa, Artificial Sequence
  Synthetically generated peptide
  VARIANT (1)...(16): Xaa = Any Amino Acid
  VARIANT (1)...(16): Xaa = Any Amino Acid
CCEYCCNPACXTXGCY

SEQ ID NO: 1603 - protein, 17 aa, Artificial Sequence
  Synthetically generated peptide
  VARIANT (1)...(17): Xaa = Any Amino Acid
CCEYCCNPACXTXXGCY

SEQ ID NO: 1604 - protein, 18 aa, Artificial Sequence
  Synthetically generated peptide
  VARIANT (1)...(18): Xaa = Any Amino Acid
CCEYCCNPACXTXXXGCY

SEQ ID NO: 1605 - protein, 18 aa, Artificial Sequence
  Synthetically generated peptide
  VARIANT (1)...(18): Xaa = Any Amino Acid
CCEYCCNPACXTXXGXCY

SEQ ID NO: 1606 - protein, 18 aa, Artificial Sequence
  Synthetically generated peptide
  VARIANT (1)...(18): Xaa = Any Amino Acid
CCEYCCNPACXTXXGCXY

SEQ ID NO: 1607 - protein, 17 aa, Artificial Sequence
  Synthetically generated peptide
  VARIANT (1)...(17): Xaa = Any Amino Acid
CCEYCCNPACXTXGXCY

SEQ ID NO: 1608 - protein, 18 aa, Artificial Sequence
  Synthetically generated peptide
  VARIANT (1)...(18): Xaa = Any Amino Acid
CCEYCCNPACXTXGXXCY

SEQ ID NO: 1609 - protein, 18 aa, Artificial Sequence
  Synthetically generated peptide
  VARIANT (1)...(18): Xaa = Any Amino Acid
CCEYCCNPACXTXGXCXY

SEQ ID NO: 1610 - protein, 17 aa, Artificial Sequence
  Synthetically generated peptide
  VARIANT (1)...(17): Xaa = Any Amino Acid
CCEYCCNPACXTXGCXY

SEQ ID NO: 1611 - protein, 18 aa, Artificial Sequence
  Synthetically generated peptide
  VARIANT (1)...(18): Xaa = Any Amino Acid
CCEYCCNPACXTXGCXXY

SEQ ID NO: 1612 - protein, 16 aa, Artificial Sequence
  Synthetically generated peptide
  VARIANT (1)...(16): Xaa = Any Amino Acid
  VARIANT (1)...(16): Xaa = Any Amino Acid
CCEYCCNPACXTGXCY

SEQ ID NO: 1613 - protein, 17 aa, Artificial Sequence
  Synthetically generated peptide
  VARIANT (1)...(17): Xaa = Any Amino Acid
CCEYCCNPACXTGXXCY

SEQ ID NO: 1614 - protein, 18 aa, Artificial Sequence
  Synthetically generated peptide
  VARIANT (1)...(18): Xaa = Any Amino Acid
CCEYCCNPACXTGXXXCY

SEQ ID NO: 1615 - protein, 18 aa, Artificial Sequence
  Synthetically generated peptide
  VARIANT (1)...(18): Xaa = Any Amino Acid
CCEYCCNPACXTGXXCXY

SEQ ID NO: 1616 - protein, 17 aa, Artificial Sequence
  Synthetically generated peptide
  VARIANT (1)...(17): Xaa = Any Amino Acid
CCEYCCNPACXTGXCXY

SEQ ID NO: 1617 - protein, 18 aa, Artificial Sequence
  Synthetically generated peptide
  VARIANT (1)...(18): Xaa = Any Amino Acid
CCEYCCNPACXTGXCXXY

SEQ ID NO: 1618 - protein, 16 aa, Artificial Sequence
  Synthetically generated peptide
  VARIANT (1)...(16): Xaa = Any Amino Acid
  VARIANT (1)...(16): Xaa = Any Amino Acid
CCEYCCNPACXTGCXY

SEQ ID NO: 1619 - protein, 17 aa, Artificial Sequence
  Synthetically generated peptide
  VARIANT (1)...(17): Xaa = Any Amino Acid
CCEYCCNPACXTGCXXY

SEQ ID NO: 1620 - protein, 18 aa, Artificial Sequence
  Synthetically generated peptide
  VARIANT (1)...(18): Xaa = Any Amino Acid
CCEYCCNPACXTGCXXXY

SEQ ID NO: 1621 - protein, 15 aa, Artificial Sequence
  Synthetically generated peptide
  VARIANT (1)...(15): Xaa = Any Amino Acid
  VARIANT (1)...(15): Xaa = Any Amino Acid
CCEYCCNPACTXGCY

SEQ ID NO: 1622 - protein, 16 aa, Artificial Sequence
  Synthetically generated peptide
  VARIANT (1)...(16): Xaa = Any Amino Acid
  VARIANT (1)...(16): Xaa = Any Amino Acid
CCEYCCNPACTXXGCY

SEQ ID NO: 1623 - protein, 17 aa, Artificial Sequence
  Synthetically generated peptide
  VARIANT (1)...(17): Xaa = Any Amino Acid
CCEYCCNPACTXXXGCY

SEQ ID NO: 1624 - protein, 18 aa, Artificial Sequence
  Synthetically generated peptide
  VARIANT (1)...(18): Xaa = Any Amino Acid
CCEYCCNPACTXXXXGCY

SEQ ID NO: 1625 - protein, 18 aa, Artificial Sequence
  Synthetically generated peptide
  VARIANT (1)...(18): Xaa = Any Amino Acid
CCEYCCNPACTXXXGXCY

SEQ ID NO: 1626 - protein, 18 aa, Artificial Sequence
  Synthetically generated peptide
  VARIANT (1)...(18): Xaa = Any Amino Acid
CCEYCCNPACTXXXGCXY

SEQ ID NO: 1627 - protein, 17 aa, Artificial Sequence
  Synthetically generated peptide
  VARIANT (1)...(17): Xaa = Any Amino Acid
CCEYCCNPACTXXGXCY

SEQ ID NO: 1628 - protein, 18 aa, Artificial Sequence
  Synthetically generated peptide
  VARIANT (1)...(18): Xaa = Any Amino Acid
CCEYCCNPACTXXGXXCY

SEQ ID NO: 1629 - protein, 18 aa, Artificial Sequence
  Synthetically generated peptide
  VARIANT (1)...(18): Xaa = Any Amino Acid
CCEYCCNPACTXXGXCXY

SEQ ID NO: 1630 - protein, 17 aa, Artificial Sequence
  Synthetically generated peptide
  VARIANT (1)...(17): Xaa = Any Amino Acid
CCEYCCNPACTXXGCXY

SEQ ID NO: 1631 - protein, 18 aa, Artificial Sequence
  Synthetically generated peptide
  VARIANT (1)...(18): Xaa = Any Amino Acid
CCEYCCNPACTXXGCXXY

SEQ ID NO: 1632 - protein, 16 aa, Artificial Sequence
  Synthetically generated peptide
  VARIANT (1)...(16): Xaa = Any Amino Acid
  VARIANT (1)...(16): Xaa = Any Amino Acid
CCEYCCNPACTXGXCY

SEQ ID NO: 1633 - protein, 17 aa, Artificial Sequence
  Synthetically generated peptide
  VARIANT (1)...(17): Xaa = Any Amino Acid
CCEYCCNPACTXGXXCY

SEQ ID NO: 1634 - protein, 18 aa, Artificial Sequence
  Synthetically generated peptide
  VARIANT (1)...(18): Xaa = Any Amino Acid
CCEYCCNPACTXGXXXCY

SEQ ID NO: 1635 - protein, 18 aa, Artificial Sequence
  Synthetically generated peptide
  VARIANT (1)...(18): Xaa = Any Amino Acid
CCEYCCNPACTXGXXCXY

SEQ ID NO: 1636 - protein, 17 aa, Artificial Sequence
  Synthetically generated peptide
  VARIANT (1)...(17): Xaa = Any Amino Acid
CCEYCCNPACTXGXCXY

SEQ ID NO: 1637 - protein, 18 aa, Artificial Sequence
  Synthetically generated peptide
  VARIANT (1)...(18): Xaa = Any Amino Acid
CCEYCCNPACTXGXCXXY

SEQ ID NO: 1638 - protein, 16 aa, Artificial Sequence
  Synthetically generated peptide
  VARIANT (1)...(16): Xaa = Any Amino Acid
  VARIANT (1)...(16): Xaa = Any Amino Acid
CCEYCCNPACTXGCXY

SEQ ID NO: 1639 - protein, 17 aa, Artificial Sequence
  Synthetically generated peptide
  VARIANT (1)...(17): Xaa = Any Amino Acid
CCEYCCNPACTXGCXXY

SEQ ID NO: 1640 - protein, 18 aa, Artificial Sequence
  Synthetically generated peptide
  VARIANT (1)...(18): Xaa = Any Amino Acid
CCEYCCNPACTXGCXXXY

SEQ ID NO: 1641 - protein, 15 aa, Artificial Sequence
  Synthetically generated peptide
  VARIANT (1)...(15): Xaa = Any Amino Acid
  VARIANT (1)...(15): Xaa = Any Amino Acid
CCEYCCNPACTGXCY

SEQ ID NO: 1642 - protein, 16 aa, Artificial Sequence
  Synthetically generated peptide
  VARIANT (1)...(16): Xaa = Any Amino Acid
  VARIANT (1)...(16): Xaa = Any Amino Acid
CCEYCCNPACTGXXCY

SEQ ID NO: 1643 - protein, 17 aa, Artificial Sequence
  Synthetically generated peptide
  VARIANT (1)...(17): Xaa = Any Amino Acid
CCEYCCNPACTGXXXCY

SEQ ID NO: 1644 - protein, 18 aa, Artificial Sequence
  Synthetically generated peptide
  VARIANT (1)...(18): Xaa = Any Amino Acid
CCEYCCNPACTGXXXXCY

SEQ ID NO: 1645 - protein, 18 aa, Artificial Sequence
  Synthetically generated peptide
  VARIANT (1)...(18): Xaa = Any Amino Acid
CCEYCCNPACTGXXXCXY

SEQ ID NO: 1646 - protein, 17 aa, Artificial Sequence
  Synthetically generated peptide
  VARIANT (1)...(17): Xaa = Any Amino Acid
CCEYCCNPACTGXXCXY

SEQ ID NO: 1647 - protein, 18 aa, Artificial Sequence
  Synthetically generated peptide
  VARIANT (1)...(18): Xaa = Any Amino Acid
CCEYCCNPACTGXXCXXY

SEQ ID NO: 1648 - protein, 16 aa, Artificial Sequence
  Synthetically generated peptide
  VARIANT (1)...(16): Xaa = Any Amino Acid
CCEYCCNPACTGXCXY

SEQ ID NO: 1649 - protein, 17 aa, Artificial Sequence
  Synthetically generated peptide
  VARIANT (1)...(17): Xaa = Any Amino Acid
CCEYCCNPACTGXCXXY

SEQ ID NO: 1650 - protein, 18 aa, Artificial Sequence
  Synthetically generated peptide
  VARIANT (1)...(18): Xaa = Any Amino Acid
CCEYCCNPACTGXCXXXY

SEQ ID NO: 1651 - protein, 15 aa, Artificial Sequence
  Synthetically generated peptide
  VARIANT (1)...(15): Xaa = Any Amino Acid
CCEYCCNPACTGCXY

SEQ ID NO: 1652 - protein, 16 aa, Artificial Sequence
  Synthetically generated peptide
  VARIANT (1)...(16): Xaa = Any Amino Acid
CCEYCCNPACTGCXXY

SEQ ID NO: 1653 - protein, 17 aa, Artificial Sequence
  Synthetically generated peptide
  VARIANT (1)...(17): Xaa = Any Amino Acid
CCEYCCNPACTGCXXXY

SEQ ID NO: 1654 - protein, 18 aa, Artificial Sequence
  Synthetically generated peptide
  VARIANT (1)...(18): Xaa = Any Amino Acid
CCEYCCNPACTGCXXXXY

SEQ ID NO: 1655 - DNA, 42 bp, Artificial Sequence
  Synthetically generated oligonucleotide
cacaccatatgaagaaatcaatattatttatttttctttctg

SEQ ID NO: 1656 - DNA, 46 bp, Artificial Sequence
  Synthetically generated oligonucleotide
cacacctcgagttaggtctccatgctttcaggaccacttttattac

SEQ ID NO: 1657 - DNA, 69 bp, Artificial Sequence
  Synthetically generated oligonucleotide
gcatgaatagtagcaattactgctgtgaattgtgttgtaatcctgcttgtaccgggtgctattaataac

SEQ ID NO: 1658 - DNA, 69 bp, Artificial Sequence
  Synthetically generated oligonucleotide
tcgagttattaatagcacccggtacaagcaggattacaacacaattcacagcagtaattgctactattc

SEQ ID NO: 1659 - DNA, 69 bp, Artificial Sequence
  Synthetically generated oligonucleotide
gcatgaatagtagcaattactgctgtgaatattgttgtaatcctgcttgtaccgggtgctattaataac

SEQ ID NO: 1660 - DNA, 69 bp, Artificial Sequence
  Synthetically generated oligonucleotide
tcgagttattaatagcacccggtacaagcaggattacaacaatattcacagcagtaattgctactattc

SEQ ID NO: 1661 - protein, 5 aa, Artificial Sequence
  Synthetically generated peptide
QHNPR

SEQ ID NO: 1662 - protein, 6 aa, Artificial Sequence
  Synthetically generated peptide
VQHNPR

SEQ ID NO: 1663 - protein, 7 aa, Artificial Sequence
  Synthetically generated peptide
VRQHNPR

SEQ ID NO: 1664 - protein, 8 aa, Artificial Sequence
  Synthetically generated peptide
VRGQHNPR

SEQ ID NO: 1665 - protein, 9 aa, Artificial Sequence
  Synthetically generated peptide
VRGPQHNPR

SEQ ID NO: 1666 - protein, 10 aa, Artificial Sequence
  Synthetically generated peptide
VRGPRQHNPR

SEQ ID NO: 1667 - protein, 11 aa, Artificial Sequence
  Synthetically generated peptide
VRGPRRQHNPR

SEQ ID NO: 1668 - protein, 6 aa, Artificial Sequence
  Synthetically generated peptide
RQHNPR

SEQ ID NO: 1669 - protein, 21 aa, Artificial Sequence
  Synthetically generated peptide
  VARIANT 1, 2, 3, 4, 5: Xaa is missing
  VARIANT 8: Xaa = Glu
  VARIANT 9: Xaa = Leu, Ile, Lys, Arg, Trp, Tyr or Phe
  VARIANT 12: Xaa = Asn
  VARIANT 13: Xaa = Pro
  VARIANT 14: Xaa = Ala
  VARIANT 16: Xaa = Thr, Ala, Lys, Arg, Trp
  VARIANT 17: Xaa = Gly
  VARIANT 19: Xaa = Tyr or Leu
  VARIANT 20, 21: Xaa20 = Asp; Xaa21 = Phe; or missing
XXXXXCCXXCCXXXCXXCXXX

SEQ ID NO: 1670 - protein, 21 aa, Artificial Sequence
  Synthetically generated peptide
  VARIANT 1, 2, 3, 4, 5: Xaa1= Asn, Xaa2 = Ser, Xaa3 = Ser, Xaa4 = Asn, Xaa5 = Tyr; or mising
  VARIANT 1, 2, 3, 4: Xaa = missing
  VARIANT 5: Xaa = Asn, Trp, Tyr, Asp, Ile, Thr or Phe
  VARIANT 8: Xaa = Glu, Asp, Gln, Gly or Pro
  VARIANT 9: Xaa = Leu, Ile, Val, Ala, Lys, Arg, Trp, Tyr or Phe
  VARIANT 12: Xaa = Asn, Tyr, Asp or Ala
  VARIANT 13: Xaa = Pro or Gly
  VARIANT 14: Xaa = Ala, Leu, Ser, Gly, Val, Glu, Gln, Ile, Leu, Lys, Arg, and Asp
  VARIANT 16: Xaa = Thr, Ala, Asn, Lys, Arg
  VARIANT 17: Xaa = Gly, Pro or Ala
  VARIANT 19: Xaa = Trp, Tyr, Phe or Leu
  VARIANT 19-21: Xaa = Asp, Phe or missing; or Xaa20 = Asn, or Glu and Xaa21 is missing; or Xaa19, Xaa20, Xaa21 = is missing
XXXXXCCXXCCXXXCXXCXXX

SEQ ID NO: 1671 - protein, 21 aa, Artificial Sequence
  Synthetically generated peptide
  VARIANT 1, 2, 3, 4, 5: Xaa = missing
  VARIANT 8: Xaa = Glu
  VARIANT 9: Xaa = Leu, Ile, Lys, Arg, Trp, Tyr, or Phe
  VARIANT 12: Xaa = Asn
  VARIANT 13: Xaa = Pro
  VARIANT 14: Xaa = Ala
  VARIANT 16: Xaa = Thr, Ala, Lys, Arg, Trp  or X16 = any amino acid; or X16 = Thr, Ala, Lys, Arg, Trp or any non-aromatic amino acid
  VARIANT 17: Xaa = Gly
  VARIANT 19: Xaa = Tyr or Leu
  VARIANT 20, 21: Xaa20 = Asp, Xaa21 = Phe or missing
XXXXXCCXXCCXXXCXXCXXX

SEQ ID NO: 1672 - protein, 21 aa, Artificial Sequence
  Synthetically generated peptide
  VARIANT 1, 2, 3, 4, 5: Xaa1 = Asn, Xaa2 = Ser, Xaa3 = Ser, Xaa4 = Asn, Xaa5 = Tyr or missing; or Xaa1- Xaa4 is missing and Xaa5 = Asn
  VARIANT 8: Xaa = Glu or Asp
  VARIANT 9: Xaa = Leu, Ile, Val, Trp, Tyr or Phe
  VARIANT 16: Xaa =  Thr, Ala, or Trp
  VARIANT 19: Xaa = Trp, Tyr, Or Leu or is missing
  VARIANT 20, 21: Xaa = Asp, Phe
XXXXXCCXXCCNPACXGCXXX

SEQ ID NO: 1673 - protein, 21 aa, Artificial Sequence
  Synthetically generated peptide
  VARIANT 1, 2, 3, 4: Xaa = is missing
  VARIANT 5: Xaa = Asn
  VARIANT 9: Xaa = Trp, Tyr or Phe;
  VARIANT 16: Xaa = Thr or Ala
  VARIANT 19: Xaa = Trp, Tyr, Phe
  VARIANT 20, 21: Xaa = Asp, Phe
XXXXXCCXXCCNPACXGCXXX

SEQ ID NO: 1674 - protein, 21 aa, Artificial Sequence
  Synthetically generated peptide
  VARIANT 1, 2, 3, 4, 5: Xaa = Xaa1 = Asn, Xaa2 = Ser, Xaa3 = Ser, Xaa4 = Asn, Xaa5 = Tyr, or is missing; or Xaa1- Xaa4 is mising and Xaa5 = Asn, Trp, Tyr, Asp, Ile, Thr
  VARIANT 8: Xaa = Glu, Asp, Gln, Gly or Pro
  VARIANT 9: Xaa = Leu, Ile, Val, Ala, Lys, Arg, Trp, Tyr or Phe
  VARIANT 12: Xaa = Asn, Tyr, Asp or Ala
  VARIANT 13: Xaa = Pro or Gly
  VARIANT 14: Xaa = Ala, Leu, Ser, Gly, Val, Glu, Gln, Ile, Leu, Lys, Arg or Asp
  VARIANT 16: Xaa = Thr, Ala, Asn, Lys, Arg, Trp
  VARIANT 17: Xaa = Gly, Pro or Ala
  VARIANT 19: Xaa = Trp, Tyr, Phe or Leu; or Xaa = Lys or Arg
  VARIANT 20: Xaa = Asp, Phe or missing; or Xaa20 = Asn or Glu and Xaa21 is missing
  VARIANT 19, 21: Xaa  is miising
XXXXXCCXXCCXXXCXXCXXX

SEQ ID NO: 1675 - protein, 21 aa, Artificial Sequence
  Synthetically generated peptide
  VARIANT 1, 2, 3, 4, 5: Xaa is missing
  VARIANT 8: Xaa = Glu
  VARIANT 9: Xaa = Leu, Ile, Lys, Arg, Trp, Tyr or Phe
  VARIANT 12: Xaa = Asn
  VARIANT 13: Xaa = Pro
  VARIANT 14: Xaa = Ala
  VARIANT 16: Xaa = Thr, Ala, Lys, Arg, Trp
  VARIANT 17: Xaa = Gly
  VARIANT 19: Xaa = Tyr or Leu; or Xaa = Lys or Arg
  VARIANT 20, 21: Xaa = Asp, Phe or is missing
XXXXXCCXXCCXXXCXXCXXX

What is claimed is:

1. A purified peptide comprising the amino acid sequence (I): Xaa₁ Xaa₂ Xaa₃ Xaa₄ Xaa₅ Cys₆ Cys₇ Xaa₈ Xaa₉ Cys₁₀ Cys₁₁ Xaa₁₂ Xaa₁₃ Xaa₁₄ Cys₁₅ Xaa₁₆ Xaa₁₇ Cys₁₈ Xaa₁₉ Xaa₂₀ Xaa₂₁ (SEQ ID NO:1) wherein: Xaa₁ Xaa₂ Xaa₃ Xaa₄ Xaa₅ is Asn Ser Ser Asn Tyr (SEO ID NO:126) or is missing or Xaa₁ Xaa₂ Xaa₃ Xaa₄ is missing.

2. The purified peptide of claim 1 wherein Xaa₅ is Asn, Trp, Tyr, Asp, or Phe.

3. The purified peptide of claim 1 wherein Xaa₅ is Thr or Ile.

4. The purified peptide of claim 1 wherein Xaa₅ is Tyr, Asp or Trp.

5. The purified peptide of claim 1 wherein Xaa₈ is Glu, Asp, Gln, Gly or Pro.

6. The purified peptide of claim 1 wherein Xaa₉ is Leu, Ile, Val, Ala, Lys, Arg, Trp, Tyr or Phe.

7. The purified peptide of claim 1 wherein Xaa₉ is Leu, Ile, Val, Lys, Arg, Trp, Tyr or Phe.

8. The purified peptide of claim 1 wherein Xaa₁₂ is Asn, Tyr, Asp or Ala.

9. The purified peptide of claim 1 wherein Xaa₁₃ is Ala, Pro or Gly.

10. The purified peptide of claim 1 wherein Xaa₁₄ is Ala, Leu, Ser, Gly, Val, Glu, Gln, Ile, Leu, Lys, Arg, or Asp.

11. The purified peptide of claim 1 wherein Xaa₁₆ is Thr, Ala, Asn, Lys, Arg, Trp.

12. The purified peptide of claim 1 wherein Xaa₁₇ is Gly, Pro or Ala.

13. The purified peptide of claim 1 wherein Xaa₁₉ is Trp, Tyr, Phe, Asn or Leu.

14. The purified peptide of claim 1 wherein Xaa₁₉ is Lys or Arg.

15. The purified peptide of claim 1 wherein Xaa₂₀ Xaa₂₁ is AspPhe or Xaa₂₀ is Asn or Glu and Xaa₂₁ is missing.

16. The purified peptide of claim 1 wherein Xaa₁₉Xaa₂₀Xaa₂₁ is missing.

17. A purified peptide comprising the amino acid sequence: Asn Ser Ser Asn Tyr Cys Cys Glu Tyr Cys Cys Asn Pro Ala Cys Thr Gly Cys Tyr (SEQ ID NO:5).

18. A purified peptide comprising the amino acid sequence: Cys Cys Glu Tyr Cys Cys Asn Pro Ala Cys Thr Gly Cys Tyr (SEQ ID NO:3).

19. A purified peptide consisting of the amino acid sequence: Asn Ser Ser Asn Tyr Cys Cys Glu Tyr Cys Cys Asn Pro Ala Cys Thr Gly Cys Tyr (SEQ ID NO:5).

20. A purified peptide consisting of the amino acid sequence: Cys Cys Glu Tyr Cys Cys Asn Pro Ala Cys Thr Gly Cys Tyr (SEQ ID NO:3).

21. A method for treating a gastrointestinal disorder in a patient comprising administering a composition comprising a purified peptide comprising the amino acid sequence: Asn Ser Ser Asn Tyr Cys Cys Glu Leu Cys Cys Asn Pro Ala Cys Thr Gly Cys Tyr (SEQ ID NO:4).

22. A method for treating a gastrointestinal disorder in a patient comprising administering a composition comprising a purified peptide comprising the amino acid sequence: Asn Ser Ser Asn Tyr Cys Cys Glu Tyr Cys Cys Asn Pro Ala Cys Thr Gly Cys Tyr (SEQ ID NO:5).

23. A method for treating a gastrointestinal disorder in a patient comprising administering a compositon comprising a purified peptide comprising the amino acid sequence: Cys Cys Glu Leu Cys Cys Asn Pro Ala Cys Thr Gly Cys Tyr (SEQ ID NO:6)

24. A method for treating a gastrointestinal disorder in a patient comprising administering a composition comprising a purified peptide comprising the amino acid sequence: Cys Cys Glu Tyr Cys Cys Asn Pro Ala Cys Thr Gly Cys Tyr (SEQ ID NO:3).

25. A purified polypeptide comprising an amino acid sequence of any of:
(SEQ ID NO:[[--]]7)
Asn Ser Ser Asn Tyr Cys Cys Glu Leu Cys Cys Asn
Pro Ala Cys Trp Gly Cys Tyr;
(SEQ ID NO:[[---]]8)
Cys Cys Glu Leu Cys Cys Asn Pro Ala Cys Trp Gly
Cys Tyr;
(SEQ ID NO:[[---]]9)
Asn Cys Cys Glu Leu Cys Cys Asn Pro Ala Cys Thr
Gly Cys Tyr;
(SEQ ID NO:[[---]]10)
Asn Cys Cys Glu Leu Cys Cys Asn Pro Ala Cys Trp
Gly Cys Tyr;
(SEQ ID NO:[[---]]11)
Asn Cys Cys Glu Phe Cys Cys Asn Pro Ala Cys Thr
Gly Cys Tyr;
(SEQ ID NO:[[---]]12)
Asn Cys Cys Glu Tyr Cys Cys Asn Pro Ala Cys Thr
Gly Cys Tyr;
(SEQ ID NO:[[---]]13)
Asn Cys Cys Glu Trp Cys Cys Asn Pro Ala Cys Thr
Gly Cys Tyr;
(SEQ ID NO:[[---]]14)
Asn Cys Cys Glu Arg Cys Cys Asn Pro Ala Cys Thr
Gly Cys Tyr;
(SEQ ID NO:[[---]]15)
Asn Cys Cys Glu Lys Cys Cys Asn Pro Ala Cys Thr
Gly Cys Tyr;
(SEQ ID NO:[[---]]16)
Asn Ser Ser Asn Tyr Cys Cys Glu Leu Cys Cys Asn
Pro Ala Cys Thr Gly Cys Tyr Asp Phe;
(SEQ ID NO:[[---]]17)
Asn Ser Ser Asn Tyr Cys Cys Glu Leu Cys Cys Asn
Pro Ala Cys Trp Gly Cys Tyr Asp Phe;
(SEQ ID NO:[[---]]18)
Asn Ser Ser Asn Tyr Cys Cys Glu Phe Cys Cys Asn
Pro Ala Cys Thr Gly Cys Tyr Asp Phe;
(SEQ ID NO:[[---]]19)
Asn Ser Ser Asn Tyr Cys Cys Glu Tyr Cys Cys Asn
Pro Ala Cys Thr Gly Cys Tyr Asp Phe;
(SEQ ID NO:[[---]]20)
Asn Ser Ser Asn Tyr Cys Cys Glu Trp Cys Cys Asn
Pro Ala Cys Thr Gly Cys Tyr Asp Phe;
(SEQ ID NO:[[---]]21)
Asn Ser Ser Asn Tyr Cys Cys Glu Arg Cys Cys Asn
Pro Ala Cys Thr Gly Cys Tyr Asp Phe;
(SEQ ID NO:[[---]]22)
Asn Ser Ser Asn Tyr Cys Cys Glu Lys Cys Cys Asn
Pro Ala Cys Thr Gly Cys Tyr Asp Phe;
(SEQ ID NO:[[---]]23)
Cys Cys Glu Leu Cys Cys Asn Pro Ala Cys Thr Gly
Cys Tyr Asp Phe;
(SEQ ID NO:[[---]]24)
Cys Cys Glu Leu Cys Cys Asn Pro Ala Cys Trp Gly
Cys Tyr Asp Phe;
(SEQ ID NO:[[---]]25)
Cys Cys Glu Phe Cys Cys Asn Pro Ala Cys Thr Gly
Cys Tyr Asp Phe;
(SEQ ID NO:[[---]]26)
Cys Cys Glu Tyr Cys Cys Asn Pro Ala Cys Thr Gly
Cys Tyr Asp Phe;
(SEQ ID NO:[[---]]27)
Cys Cys Glu Trp Cys Cys Asn Pro Ala Cys Thr Gly
Cys Tyr Asp Phe;
(SEQ ID NO:[[---]]28)
Cys Cys Glu Arg Cys Cys Asn Pro Ala Cys Thr Gly
Cys Tyr Asp Phe;
(SEQ ID NO:[[---]]29)
Cys Cys Glu Lys Cys Cys Asn Pro Ala Cys Thr Gly
Cys Tyr Asp Phe;
(SEQ ID NO:[[---]]30)
Asn Cys Cys Glu Leu Cys Cys Asn Pro Ala Cys Thr
Gly Cys Tyr Asp Phe;
(SEQ ID NO:[[---]]31)
Asn Cys Cys Glu Leu Cys Cys Asn Pro Ala Cys Trp
Gly Cys Tyr Asp Phe;
(SEQ ID NO:[[---]]32)
Asn Cys Cys Glu Phe Cys Cys Asn Pro Ala Cys Thr
Gly Cys Tyr Asp Phe;
(SEQ ID NO:[[---]]33)
Asn Cys Cys Glu Tyr Cys Cys Asn Pro Ala Cys Thr
Gly Cys Tyr Asp Phe;
(SEQ ID NO:[[---]]34)
Asn Cys Cys Glu Trp Cys Cys Asn Pro Ala Cys Thr
Gly Cys Tyr Asp Phe;
(SEQ ID NO:[[---]]35)
Asn Cys Cys Glu Arg Cys Cys Asn Pro Ala Cys Thr
Gly Cys Tyr Asp Phe;
(SEQ ID NO:[[---]]36)
Asn Cys Cys Glu Lys Cys Cys Asn Pro Ala Cys Thr
Gly Cys Tyr Asp Phe;
(SEQ ID NO:[[---]]37)
Gln Ser Ser Asn Tyr Cys Cys Glu Tyr Cys Cys Asn
Pro Ala Cys Thr Gly Cys Tyr;
(SEQ ID NO:[[---]]38)
Asn Thr Ser Asn Tyr Cys Cys Glu Tyr Cys Cys Asn
Pro Ala Cys Thr Gly Cys Tyr;
(SEQ ID NO:[[---]]39)
Asn Leu Ser Asn Tyr Cys Cys Glu Tyr Cys Cys Asn
Pro Ala Cys Thr Gly Cys Tyr;
(SEQ ID NO:[[---]]40)
Asn Ile 5cr Asn Tyr Cys Cys Glu Tyr Cys Cys Asn
Pro Ala Cys Thr Gly Cys Tyr;
(SEQ ID NO:[[---]]41)
Asn Ser Ser Gln Tyr Cys Cys Glu Tyr Cys Cys Asn
Pro Ala Cys Thr Gly Cys Tyr;
(SEQ ID NO:[[---]]42)
Ser Ser Asn Tyr Cys Cys Glu Tyr Cys Cys Asn Pro
Ala Cys Thr Gly Cys Tyr;
(SEQ ID NO:[[---]]43)
Gln Ser Ser Gln Tyr Cys Cys Glu Tyr Cys Cys Asn
Pro Ala Cys Thr Gly Cys Tyr;
(SEQ ID NO:[[---]]44)
Ser Ser Gln Tyr Cys Cys Glu Tyr Cys Cys Asn Pro
Ala Cys Thr Gly Cys Tyr;
(SEQ ID NO:[[---]]45)
Asn Ser Ser Asn Tyr Cys Cys Glu Ala Cys Cys Asn
Pro Ala Cys Thr Gly Cys Tyr;
(SEQ ID NO:[[---]]46)
Asn Ser Ser Asn Tyr Cys Cys Glu Arg Cys Cys Asn
Pro Ala Cys Thr Gly Cys Tyr;
(SEQ ID NO:[[---]]47)
Asn Ser Ser Asn Tyr Cys Cys Glu Asn Cys Cys Asn
Pro Ala Cys Thr Gly Cys Tyr;
(SEQ ID NO:[[---]]48)
Asn Ser Ser Asn Tyr Cys Cys Glu Asp Cys Cys Asn
Pro Ala Cys Thr Gly Cys Tyr;
(SEQ ID NO:[[---]]49)
Asn Ser Ser Asn Tyr Cys Cys Glu Cys Cys Cys Asn
Pro Ala Cys Thr Gly Cys Tyr;
(SEQ ID NO:[[---]]50)
Asn Ser Ser Asn Tyr Cys Cys Glu Gln Cys Cys Asn
Pro Ala Cys Thr Gly Cys Tyr;
(SEQ ID NO:[[---]]51)
Asn Ser Ser Asn Tyr Cys Cys Glu Glu Cys Cys Asn
Pro Ala Cys Thr Gly Cys Tyr;
(SEQ ID NO:[[---]]52)
Asn Ser Ser Asn Tyr Cys Cys Glu Gly Cys Cys Asn
Pro Ala Cys Thr Gly Cys Tyr;
(SEQ ID NO:[[---]]53)
Asn Ser Ser Asn Tyr Cys Cys Glu His Cys Cys Asn
Pro Ala Cys Thr Gly Cys Tyr;
(SEQ ID NO:[[---]]54)
Asn Ser Ser Asn Tyr Cys Cys Glu Ile Cys Cys Asn
Pro Ala Cys Thr Gly Cys Tyr;
(SEQ ID NO:[[---]]55)
Asn Ser Ser Asn Tyr Cys Cys Glu Lys Cys Cys Asn
Pro Ala Cys Thr Gly Cys Tyr;
(SEQ ID NO:[[---]]56)
Asn Ser Ser Asn Tyr Cys Cys Glu Met Cys Cys Asn
Pro Ala Cys Thr Gly Cys Tyr;
(SEQ ID NO:[[---]]57)
Asn Ser Ser Asn Tyr Cys Cys Glu Phe Cys Cys Asn
Pro Ala Cys Thr Gly Cys Tyr;
(SEQ ID NO:[[---]]58)
Asn Ser Ser Asn Tyr Cys Cys Glu Pro Cys Cys Asn
Pro Ala Cys Thr Gly Cys Tyr;
(SEQ ID NO:[[---]]59)
Asn Ser Ser Asn Tyr Cys Cys Glu Ser Cys Cys Asn
Pro Ala Cys Thr Gly Cys Tyr;
(SEQ ID NO:[[---]]60)
Asn Ser Ser Asn Tyr Cys Cys Glu Thr Cys Cys Asn
Pro Ala Cys Thr Gly Cys Tyr;
(SEQ ID NO:[[---]]61)
Asn Ser Ser Asn Tyr Cys Cys Glu Trp Cys Cys Asn
Pro Ala Cys Thr Gly Cys Tyr;
(SEQ ID NO:[[---]]62)
Asn Ser Ser Asn Tyr Cys Cys Glu Val Cys Cys Asn
Pro Ala Cys Thr Gly Cys Tyr;
(SEQ ID NO:[[---]]63)
Cys Cys Glu Ala Cys Cys Asn Pro Ala Cys Thr Gly
Cys Tyr;
(SEQ ID NO:[[---]]64)
Cys Cys Glu Arg Cys Cys Asn Pro Ala Cys Thr Gly
Cys Tyr;
(SEQ ID NO:[[---]]65)
Cys Cys Glu Asn Cys Cys Asn Pro Ala Cys Thr Gly
Cys Tyr;
(SEQ ID NO:[[---]]66)
Cys Cys Glu Asp Cys Cys Asn Pro Ala Cys Thr Gly
Cys Tyr;
(SEQ ID NO:[[---]]67)
Cys Cys Glu Cys Cys Cys Asn Pro Ala Cys Thr Gly
Cys Tyr;
(SEQ ID NO:[[---]]68)
Cys Cys Glu Gln Cys Cys Asn Pro Ala Cys Thr Gly
Cys Tyr;
(SEQ ID NO:[[---]]69)
Cys Cys Glu Glu Cys Cys Asn Pro Ala Cys Thr Gly
Cys Tyr;
(SEQ ID NO:[[---]]70)
Cys Cys Glu Gly Cys Cys Asn Pro Ala Cys Thr Gly
Cys Tyr;
(SEQ ID NO:[[---]]71)
Cys Cys Glu His Cys Cys Asn Pro Ala Cys Thr Gly
Cys Tyr;
(SEQ ID NO:[[---]]72)
Cys Cys Glu Ile Cys Cys Asn Pro Ala Cys Thr Gly
Cys Tyr;
(SEQ ID NO:[[---]]73)
Cys Cys Glu Lys Cys Cys Asn Pro Ala Cys Thr Gly
Cys Tyr;
(SEQ ID NO:[[---]]74)
Cys Cys Glu Met Cys Cys Asn Pro Ala Cys Thr Gly
Cys Tyr;
(SEQ iD NO:[[---]]75)
Cys Cys Glu Phe Cys Cys Asn Pro Ala Cys Thr Gly
Cys Tyr;
(SEQ ID NO:[[---]]76)
Cys Cys Glu Pro Cys Cys Asn Pro Ala Cys Thr Gly
Cys Tyr;
(SEQ ID NO:[[---]]77)
Cys Cys Glu Ser Cys Cys Asn Pro Ala Cys Thr Gly
Cys Tyr;
(SEQ ID NO:[[---]]78)
Cys Cys Glu Thr Cys Cys Asn Pro Ala Cys Thr Gly
Cys Tyr;
(SEQ ID NO:[[---]]79)
Cys Cys Glu Trp Cys Cys Asn Pro Ala Cys Thr Gly
Cys Tyr;
(SEQ ID NO:[[---]]80)
Cys Cys Glu Val Cys Cys Asn Pro Ala Cys Thr Gly
Cys Tyr;
(SEQ ID NO:4)
Asn Ser Ser Asn Tyr Cys Cys Glu Leu Cys Cys Asn
Pro Ala Cys Thr Gly Cys Tyr;
(SEQ ID NO:6)
Cys Cys Glu Leu Cys Cys Asn Pro Ala Cys Thr Gly
Cys Tyr;
(SEQ ID NO:81)
Cys Cys Glu Tyr Cys Cys Asn Pro Ala Cys Thr Gly
Cys;
(SEQ ID NO:83)
Cys Cys Glu Arg Cys Cys Asn Pro Ala Cys Thr Gly
Cys;
(SEQ ID NO:84)
Cys Cys Glu Asn Cys Cys Asn Pro Ala Cys Thr Gly
Cys;
(SEQ ID NO:85)
Cys Cys Glu Asp Cys Cys Asn Pro Ala Cys Thr Gly
Cys;
(SEQ ID NO:86)
Cys Cys Glu Cys Cys Cys Asn Pro Ala Cys Thr Gly
Cys;
(SEQ ID NO:87)
Cys Cys Glu Gln Cys Cys Asn Pro Ala Cys Thr Gly
Cys;
(SEQ ID NO:88)
Cys Cys Glu Glu Cys Cys Asn Pro Ala Cys Thr Gly
Cys;
(SEQ ID NO:89)
Cys Cys Glu Gly Cys Cys Asn Pro Ala Cys Thr Gly
Cys;
(SEQ ID NO:90)
Cys Cys Glu His Cys Cys Asn Pro Ala Cys Thr Gly
Cys;
(SEQ ID NO:91)
Cys Cys Glu Ile Cys Cys Asn Pro Ala Cys Thr Gly
Cys;
(SEQ ID NO:92)
Cys Cys Glu Lys Cys Cys Asn Pro Ala Cys Thr Gly
Cys;
(SEQ ID NO:93)
Cys Cys Glu Met Cys Cys Asn Pro Ala Cys Thr Gly
Cys;
(SEQ ID NO:94)
Cys Cys Glu Phe Cys Cys Asn Pro Ala Cys Thr Gly
Cys;
(SEQ ID NO:95)
Cys Cys Glu Pro Cys Cys Asn Pro Ala Cys Thr Gly
Cys;
(SEQ ID NO:96)
Cys Cys Glu Ser Cys Cys Asn Pro Ala Cys Thr Gly
Cys;
(SEQ ID NO:97)
Cys Cys Glu Thr Cys Cys Asn Pro Ala Cys Thr Gly
Cys;
(SEQ ID NO:98)
Cys Cys Glu Trp Cys Cys Asn Pro Ala Cys Thr Gly
Cys;
and
(SEQ ID NO:99)
Cys Cys Glu Val Cys Cys Asn Pro Ala Cys Thr Gly
Cys.

26. A method for treating a gastrointestinal disorder in a patient comprising administering a composition comprising the peptide of claim 1.

27. A method for treating a gastrointestinal disorder in a patient comprising administering a composition comprising the peptide of claim 25.

28. A method for treating a gastrointestinal disorder in a patient comprising administering a a composition comprising a GC-C receptor agonist, a pharmaceutical acceptable carrier and at least one additional therapeutic agent selected from the group consisting of acid reducing agents including proton pump inhibitors and H2 receptor blockers, promotility agents including 5HT receptor agonists and motilin agonists, anti-inflammatory agents, antispasmodics, antidepressants and laxatives and analgesic agents.

29. A method for treating a gastrointestinal disorder in a patient comprising administering a composition comprising the peptide of any of the claims 1, 17-20 and 25, a pharmaceutical acceptable carrier and at least one additional therapeutic agent selected from the group consisting of acid reducing agents including proton pump inhibitors and H2 receptor blockers, promotility agents including 5HT receptor agonists and motilin agonists, anti-inflammatory agents, antispasmodics, antidepressants and laxatives and analgesic agents.

30. The method of any of claims 21-24, 26, 27 and 28 wherein the gastrointestinal disorder is a gastrointestinal motility disorder.

31. The method of any of claims 21-24, 26, 27 and 28 wherein the gastrointestinal disorder is selected from the group consisting of a gastrointestinal motility disorder, irritable bowel syndrome, chronic constipation, a functional gastrointestinal disorder, gastroesophageal reflux disease, finctional heartburn, dyspepsia, functional dyspepsia, nonulcer dyspepsia, gastroparesis, chronic intestinal pseudo-obstruction, colonic pseudo-obstruction, Crohn's disease, ulcerative colitis, inflammatory bowel disease and post-operative ileus.

32. A method for treating obesity comprising administering a composition comprising the peptide of any of claims 1, 17-20 and 25.

33. A method for treating congestive heart failure comprising administering a composition comprising the peptide of any of claims 1, 17-20 and 25.

34. A method for treating benign prostatic hyperplasia comprising administering a composition comprising the peptide of any of claims 1, 17-20 and 25.

35. The purified peptide of any of claims 1, 17, 18 and 25 wherein the polypeptide comprises the amino acid sequence DF; QHNPR (SEQ ID NO:1661); VQHNPR (SEQ ID NO:1662); VRQHNPR (SEQ ID NO:1663); VRGQHNPR (SEQ ID NO:1664); VRGPQHNPR (SEQ ID NO:1665); VRGPRQHNPR (SEQ ID NO:1666); VRGPRRQHNPR (SEQ ID NO:1667); or RQHNPR (SEQ ID NO:1668) fused to its amino terminus or its carboxy terminus.

36. The purified peptide of any of claims 1, 17, 18 and 25 wherein the purified polypeptide comprises the amino acid sequence of an analgesic peptide selected from the group consisting of endomorphin-1, endomorphin-2, nocistatin, dalargin, lupron, and substance P fused to its amino terminus or its carboxy terminus.

37. The purified peptide of any of claims 1, 17, 18 and 25 wherein the polypeptide includes no more than 10 additional amino acids at its amino terminus or carboxy terminus or both and wherein the polypeptide is a guanylate cyclase receptor agonist.

38. The purified peptide of claim 1 wherein wherein: Xaa₁ Xaa₂ Xaa₃ Xaa₄ Xaa₅ is missing; Xaa₈ is Glu; Xaa₉ is Leu, Ile, Lys, Arg, Trp, Tyr or Phe; Xaa₁₂ is Asn; Xaa₁₃ is Pro; Xaa₁₄ is Ala; Xaa₁₆ is Thr, Ala, Lys, Arg, Trp; Xaa₁₇ is Gly; Xaa₁₉ is Tyr or Leu; and Xaa₂₀ Xaa₂₁ is AspPhe or is missing.

39. A method for treating a patient suffering from constipation, the method comprising administering a composition comprising the polypeptide of any of claims 1, 17-20 and 25.

40. A method for increasing the activity of an intestinal guanylate cyclase (GC-C) receptor in a patient, the method comprising administering a composition comprising the polypeptide of any of claims 1, 17-20 and 25.

41. A method for increasing intestinal levels of cGMP in a patient, the method comprising administering a composition comprising the polypeptide of any of claims 1, 17-20 and 25.

42. The method of claim 41 wherein the levels of cGMP are increased in intestinal mucosa.

43. A method for increasing intestinal levels of cGMP in a patient, the method comprising administering a composition comprising a GC-C receptor agonist.

44. The method of claim 43 wherein levels of cGMP are increased in intestinal mucosa.

45. A method for increasing the activity of an intestinal guanylate cyclase (GC-C) receptor in a patient, the method comprising administering a composition comprising a GC-C receptor agonist.

46. A method for treating a gastrointestinal disorder in a patient comprising administering a composition comprising a GC-C receptor agonist.

47. The method of claim 46 wherein the gastrointestinal disorder is a gastrointestinal motility disorder.

48. The method of claim 46 wherein the gastrointestinal disorder is selected from the group consisting of a gastrointestinal motility disorder, irritable bowel syndrome, chronic constipation, a functional gastrointestinal disorder, gastroesophageal reflux disease, functional heartburn, dyspepsia, functional dyspepsia, nonulcer dyspepsia, gastroparesis, chronic intestinal pseudo-obstruction, colonic pseudo-obstruction, Crohn's disease, ulcerative colitis inflammatory bowel disease and post-operative ileus.

49. A method for treating obesity comprising administering a composition comprising a GC-C receptor agonist.

50. A method for treating congestive heart failure comprising administering a composition comprising a GC-C receptor agonist.

51. A method for treating benign prostatic hyperplasia comprising administering a composition comprising a GC-C receptor agonist.

52. A method for treating visceral pain comprising administering a composition comprising a GC-C receptor agonist.

53. A method for treating inflammation comprising administering a GC-C receptor agonist.

54. A method for treating constipation comprising administering a composition comprising a GC-C receptor agonist.

55. A method for treating visceral pain comprising administering a composition comprising the polypeptide of any of claims 1, 17-20 and 25.

56. A method for treating inflammation comprising administering a composition comprising the polypeptide of any of claims 1, 17-20 and 25.

57. A method for treating cystic fibrosis comprising administering a composition comprising the polypeptide of any of claims 1, 17-20 and 25.

58. A method for treating cystic fibrosis comprising administering a composition comprising a GC-C receptor agonist.

59. A pharmaceutical composition comprising the peptide of any of claims 1, 17-20 and 25 and a pharmaceutically acceptable carrier.

60. A pharmaceutical composition comprising the peptide of any of claims 1, 17-20 and 25 surrounded by an enteric coating.

61. A controlled release pharmaceutical composition comprising the peptide of any of claims 1, 17-20 and 25 and a biodegradable polymeric matrix.

62. A pharmaceutical composition comprising the peptide of any of claims 1, 17-20 and 25, a pharmaceutically acceptable carrier and at least one analgesic agent selected from the group consisting of: calcium channel blockers, 5HT receptor agonists, 5HT receptor antagonists, opioid receptor agonists, NK1 receptor antagonists, CCK receptor agonists, NK1 receptor antagonists, NK3 receptor antagonists, norepinephrine-serotonin reuptake inhibitors, vanilloid and cannabanoid receptor agonists, sialorphin, sialorphin-related peptides

63. A pharmaceutical composition comprising the peptide of any of claims 1, 17-20 and 25, a phosphodiesterase inhibitor and a pharmaceutically acceptable carrier.

64. A method for treating cancer, a respiratory disorder, a neurological disorder, a disorder associated with fluid and sodium retention, a disorder associated with carbonate imbalance, erectile dysfunction, an insulin-related disorder, or an inner ear disorder, the method comprising administering the peptide of any of claims 1, 17-20 and 25.

65. A method for treating cancer, a respiratory disorder, a neurological disorder, a disorder associated with fluid and sodium retention, a disorder associated with carbonate imbalance, erectile dysfunction, an insulin-related disorder, or an inner ear disorder, the method comprising administering a composition comprising a GC-C receptor agonist.

66. A method of producing the peptide of any of claims 1, 17-20 and 25, comprising providing a cell harboring a nucleic acid molecule encoding the polypeptide, culturing the cell under conditions in which the peptide is expressed, and isolating the expressed peptide.

67. Amethod of producing the peptide of any of claims 1, 17-20 and 25, comprising chemically synthesizing the peptide and they purifying the synthesized peptide.

68. A pharmaceutical composition comprising the peptide of any of claims 1, 17-20 and 25 and a natriuretic peptide such as atrial natriuretic peptide, brain natriuretic peptide, a C-type natriuretic peptide, a diuretic, or an inhibitor of angiotensin converting enzyme.

69. A pharmaceutical composition comprising the peptide of any of claims 1, 17-20 and 25 and a 5-alpha reductase inhibitor or an alpha adrenergic inhibitor.

70. A pharmaceutical composition comprising the peptide of any of claims 1, 17-20 and 25 and gut hormone fragment peptide YY₃₋₃₆, glucagon-like peptide-1, exendin-4, sibutramine, phentermine, phendimetrazine, benzphetamine hydrochloride, orlistat, diethylpropion hydrochloride, fluoxetine, bupropion, ephedra, chromium, garcinia cambogia, benzocaine, bladderwrack, chitosan, nomame herba, galega, conjugated linoleic acid, L-carnitine, fiber, caffeine, dehydroepiandrosterone, germander, B-hydroxy-β-methylbutyrate, or pyruvate.

71. A pharmaceutical composition comprising a GC-C receptor agonist and a natriuretic peptide such as atrial natriuretic peptide, brain natriuretic peptide, a C-type natriuretic peptide, a diuretic, or an inhibitor of angiotensin converting enzyme.

72. A pharmaceutical composition comprising a GC-C receptor agonist and a 5-alpha reductase inhibitor or an alpha adrenergic inhibitor.

73. A pharmaceutical composition comprising a GC-C receptor agonist and gut hormone fragment peptide YY₃₋₃₆, glucagon-like peptide-1, exendin-4, sibutramine, phentermine, phendimetrazine, benzphetamine hydrochloride, orlistat, diethylpropion hydrochloride, fluoxetine, bupropion, ephedra, chromium, garcinia cambogia, benzocaine, bladderwrack, chitosan, nomame herba, galega, conjugated linoleic acid, L-carnitine, fiber, caffeine, dehydroepiandrosterone, germander, B-hydroxy-β-methylbutyrate, or pyruvate.

74. A method for treating congestive heart failure comprising administering a composition comprising the peptide of any of claims 1, 17-20 and 25 and a natriuretic peptide such as atrial natriuretic peptide, brain natriuretic peptide, a C-type natriuretic peptide, a diuretic, or an inhibitor of angiotensin converting enzyme.

75. A method for treating benign prostatic hyperplasia comprising administering a composition comprising the peptide of any of claims 1, 17-20 and 25 and a 5-alpha reductase inhibitor or an alpha adrenergic inhibitor.

76. A method for treating obesity comprising administering the peptide of any of claims 1, 17-20 and 25 and gut hormone fragment peptide YY₃₋₃₆, glucagon-like peptide-1, exendin-4, sibutramine, phentermine, phendimetrazine, benzphetamine hydrochloride, orlistat, diethylpropion hydrochloride, fluoxetine, bupropion, ephedra, chromium, garcinia cambogia, benzocaine, bladderwrack, chitosan, nomame herba, galega, conjugated linoleic acid, L-carnitine, fiber, caffeine, dehydroepiandrosterone, germander, B-hydroxy-β-methylbutyrate, or pyruvate.

77. A method for treating congestive heart failure comprising administering a composition comprising a GC-C receptor agonist and a natriuretic peptide such as atrial natriuretic peptide, brain natriuretic peptide, a C-type natriuretic peptide, a diuretic, or an inhibitor of angiotensin converting enzyme.

78. A method for treating benign prostatic hyperplasia comprising a GC-C receptor agonist and a 5-alpha reductase inhibitor or an alpha adrenergic inhibitor.

79. A method for treating obesity comprising administering a composition comprising a GC-C receptor agonist and gut hormone fragment peptide YY₃₋₃₆, glucagon-like peptide-1, exendin-4, sibutramine, phentermine, phendimetrazine, benzphetamine hydrochloride, orlistat, diethylpropion hydrochloride, fluoxetine, bupropion, ephedra, chromium, garcinia cambogia, benzocaine, bladderwrack, chitosan, nomame herba, galega, conjugated linoleic acid, L-carnitine, fiber, caffeine, dehydroepiandrosterone, germander, B-hydroxy-β-methylbutyrate, or pyruvate.

80. A purified polypetide comprising the amino acid sequence of any of the polypeptides of FIG. 11.

81. A purified polypetide comprising the amino acid sequence of any of the polypeptides of FIG. 12.

82. A pharmaceutical composition comprising the polypeptide of claim 80 or claim 81.

83. A method for treating a patient suffering from constipation, the method comprising administering a composition comprising the polypeptide of claim 80 or claim 81.

84. A method for increasing the activity of an intestinal guanylate cyclase (GC-C) receptor in a patient, the method comprising administering a composition comprising the polypeptide of claim 80 or claim 81.

85. A method for increasing intestinal levels of cGMP in a patient, the method comprising administering a composition comprising the polypeptide of of claim 80 or claim 81.

86. The method of claim 85 wherein the levels of cGMP are increased in intestinal mucosa.

87. A method for treating a gastrointestinal disorder in a patient comprising administering a composition comprising a polypeptide of claim 80 or claim 81.

88. The method of claim 87 wherein the gastrointestinal disorder is a gastrointestinal motility disorder.

89. The method of claim 87 wherein the gastrointestinal disorder is selected from the group consisting of a gastrointestinal motility disorder, irritable bowel syndrome, chronic constipation, a fuictional gastrointestinal disorder, gastroesophageal reflux disease, duodenogastric reflux, finctional heartburn, dyspepsia, functional dyspepsia, nonulcer dyspepsia, gastroparesis, chronic intestinal pseudo-obstruction, colonic pseudo-obstruction, Crohn's disease, ulcerative colitis inflammatory bowel disease and post-operative ileus.

90. A method for treating obesity comprising administering a composition comprising a polypeptide of claim 80 or claim 81.

91. A method for treating congestive heart failure comprising administering a composition comprising a polypeptide of claim 80 or claim 81.

92. A method for treating benign prostatic hyperplasia comprising administering a composition comprising a polypeptide of claim 80 or claim 81.

93. A method for treating visceral pain comprising administering a composition comprising a polypeptide of claim 80 or claim 81.

94. A method for treating inflammation comprising administering a polypeptide of claim 80 or claim 81.

95. The polyppetide of claim 12 wherein each Xaa′ is Ala or Gly.

96. A polypeptide comprising the amino acid sequence Xaa₁ Xaa₂ Xaa₃ Xaa₄ Xaa₅ Cys₆ Cys₇ Xaa₈ Xaa₉ Cys₁₀ Cys₁₁ Xaa₁₂ Xaa₁₃ Xaa₁₄ Cys₁₅ Xaa₁₆ Xaa₁₇ Cys₁₈ Xaa₁₉ Xaa₂₀ Xaa₂₁ (SEQ ID NO:1) wherein one, two, three or four amino acids other than Cys have been deleted.

97. A polypeptide comprising the amino acid sequence Xaa₁ Xaa₂ Xaa₃ Xaa₄ Xaa₅ Cys₆ Cys₇ Xaa₈ Xaa₉ Cys₁₀ Cys₁₁ Xaa₁₂ Xaa₁₃ Xaa₁₄ Cys₁₅ Xaa₁₆ Xaa₁₇ Cys₁₈ Xaa₁₉ Xaa₂₀ Xaa₂₁ (SEQ ID NO:1) wherein one, two, three or four amino acids have been inserted.
